(19) United States
(12) Patent Application Publication
(10) Pub. No.: US 2004/0175756 A1
(43) Pub. Date: Sep. 9, 2004

(54) Methods for using combinatorial libraries of monomer domains

(75) Inventors: Joost A. Kolkman, Palo Alto, CA (US); Willem P.C. Stemmer, Los Gatos, CA (US); Per-Ola Freskgard, (US)

Correspondence Address: TOWNSEND AND TOWNSEND AND CREW, LLP, TWO EMBARCADERO CENTER, EIGHTH FLOOR, SAN FRANCISCO, CA, 94111-3834, US

(73) Assignee: Avidia Research Institute, Mountain View, CA

(21) Appl. No.: 10/693,057

(22) Filed: Oct. 24, 2003

Related U.S. Application Data
(63) Continuation-in-part of application No. 10/289,660, filed on Nov. 6, 2002.
Application No. 10/289,660 is a continuation-in-part of application No. 10/133,128, filed on Apr. 26, 2002.
(60) Provisional application No. 60/374,107, filed on Apr. 18, 2002.
(60) Provisional application No. 60/333,359, filed on Nov. 26, 2001.
(60) Provisional application No. 60/337,209, filed on Nov. 19, 2001.
(60) Provisional application No. 60/286,823, filed on Apr. 26, 2001.

(51) Int. Cl. G01N 33/53; G01N 33/543

(52) U.S. Cl. 435/7.1; 436/518

(57) ABSTRACT

Methods for identifying discrete monomer domains and immuno-domains with a desired property are provided. Methods for generating multimers from two or more selected discrete monomer domains are also provided, along with methods for identifying multimers possessing a desired property. Presentation systems are also provided which present the discrete monomer and/or immuno-domains, selected monomer and/or immuno-domains, multimers and/or selected multimers to allow their selection. Compositions, libraries and cells that express one or more library member, along with kits and integrated systems, are also included in the present invention.

### CROSS-REFERENCES TO RELATED APPLICATIONS

[0001] The present application is a continuation-in-part application of U.S. Ser. No. 10/289,660, filed Nov. 6, 2002, which is a continuation-in-part application of U.S. Ser. No. 10/133,128, filed Apr. 26, 2002, which claims benefit of priority to U.S. Ser. No. 60/374,107, filed Apr. 18, 2002, U.S. Ser. No. 60/333,359, filed Nov. 26, 2001, U.S. Ser. No. 60/337,209, filed Nov. 19, 2001, and U.S. Ser. No. 60/286,823, filed Apr. 26, 2001, all of which are incorporated by reference.

### BACKGROUND OF THE INVENTION

[0002] Analysis of protein sequences and three-dimensional structures have revealed that many proteins are composed of a number of discrete monomer domains. The majority of discrete monomer domain proteins is extracellular or constitutes the extracellular parts of membrane-bound proteins.

[0003] An important characteristic of a discrete monomer domain is its ability to fold independently or with some limited assistance. Limited assistance can include assistance of a chaperonin(s) (e.g., a receptor-associated protein (RAP)).The presence of a metal ion(s) also offers limited assistance. The ability to fold independently prevents misfolding of the domain when it is inserted into a new protein environment. This characteristic has allowed discrete monomer domains to be evolutionarily mobile. As a result, discrete domains have spread during evolution and now occur in otherwise unrelated proteins. Some domains, including the fibronectin type III domains and the immunoglobin-like domain, occur in numerous proteins, while other domains are only found in a limited number of proteins.

[0004] Proteins that contain these domains are involved in a variety of processes, such as cellular transporters, cholesterol movement, signal transduction and signaling functions which are involved in development and neurotransmission. See Herz, Lipoprotein receptors: beacons to neurons?, (2001) Trends in Neurosciences 24(4):193-195; Goldstein and Brown, The Cholesterol Quartet, (2001) Science 292: 1310-1312. The function of a discrete monomer domain is often specific but it also contributes to the overall activity of the protein or polypeptide. For example, the LDL-receptor class A domain (also referred to as a class A module, a complement type repeat or an A-domain) is involved in ligand binding while the gamma-carboxyglumatic acid (Gla) domain which is found in the vitamin-K-dependent blood coagulation proteins is involved in high-affinity binding to phospholipid membranes. Other discrete monomer domains include, e.g., the epidermal growth factor (EGF)-like domain in tissue-type plasminogen activator which mediates binding to liver cells and thereby regulates the clearance of this fibrinolytic enzyme from the circulation and the cytoplasmic tail of the LDL-receptor which is involved in receptor-mediated endocytosis.

[0005] Individual proteins can possess one or more discrete monomer domains. These proteins are often called mosaic proteins. For example, members of the LDL-receptor family contain four major structural domains: the cysteine rich A-domain repeats, epidermal growth factor precursor-like repeats, a transmembrane domain and a cytoplasmic domain. The LDL-receptor family includes members that: 1) are cell-surface receptors; 2) recognize extracellular ligands; and 3) internalize them for degradation by lysosomes. See Hussain et al., The Mammalian Low-Density Lipoprotein Receptor Family, (1999) Annu. Rev. Nutr. 19:141-72. For example, some members include very-low-density lipoprotein receptors (VLDL-R), apolipoprotein E receptor 2, LDLR-related protein (LRP) and megalin. Family members have the following characteristics: 1) cell-surface expression; 2) extracellular ligand binding consisting of A-domain repeats; 3) requirement of calcium for ligand binding; 4) recognition of receptor-associated protein and apolipoprotein (apo) E; 5) epidermal growth factor (EGF) precursor homology domain containing YWTD repeats (SEQ ID NO. 198); 6) single membrane-spanning region; and 7) receptor-mediated endocytosis of various ligands. See Hussain, supra. Yet, the members bind several structurally dissimilar ligands.

[0006] It is advantageous to develop methods for generating and optimizing the desired properties of these discrete monomer domains. However, the discrete monomer domains, while often being structurally conserved, are not conserved at the nucleotide or amino acid level, except for certain amino acids, e.g., the cysteine residues in the A-domain. Thus, existing nucleotide recombination methods fall short in generating and optimizing the desired properties of these discrete monomer domains.

[0007] The present invention addresses these and other problems.

### BRIEF SUMMARY OF THE INVENTION

[0008] The present inevnetion provides methods for screening a library of monomer domains or multimers comprising monomer domains for binding affinity to multiple ligands. In some embodiments, the method comprises contacting a library of monomer domains or multimers of monomer domains to multiple ligands; and selecting monomer domains or multimers that bind to at least one of the ligands.

[0009] In some embodiments, the methods comprise (i.) contacting a library of monomer domains to multiple ligands; (ii.) selecting monomer domains that bind to at least one of the ligands; (iii.) linking the selected monomer domains to a library of monomer domains to form a library of multimers, each comprising a selected monomer domain and a second monomer domain; (iv.) contacting the library of multimers to the multiple ligands to form a plurality of complexes, each complex comprising a multimer and a ligand; and (v.) selecting at least one complex.

[0010] In some embodiments, the method further comprises linking the multimers of the selected complexes to a library of monomer domains or multimers to form a second library of multimers, each comprising a selected multimer and at least a third monomer domain; contacting the second library of multimers to the multiple ligands to form a plurality of second complexes; and selecting at least one second complex.

[0011] In some embodiments, the identity of the ligand and the multimer is determined. In some embodiments, a library of monomer domains is contacted to multiple ligands. In some embodiments, a library of multimers is contacted to multiple ligands.

[0012] In some embodiments, the multiple ligands are in a mixture. In some embodiments, the multiple ligands are in an array. In some embodiments, the multiple ligands are in or on a cell or tissue. In some embodiments, the multiple ligands are immobilized on a solid support.

[0013] In some embodiments, the ligands are polypeptides. In some embodiments, the polypeptides are expressed on the surface of phage. In some embodiments, the monomer domain or multimer library is expressed on the surface of phage.

[0014] In some embodiments, the monomer domain is a LDL receptor type A monomer domain. In some embodiments, the monomer domain is an EGF monomer domain.

[0015] In some embodiments, the library of multimers is expressed on the surface of phage to form library-expressing phage and the ligands are expressed on the surface of phage to form ligand-expressing phage, and the method comprises contacting library-expressing phage to the ligand-expressing phage to form ligand-expressing phage/library-expressing phage pairs; removing ligand-expressing phage that do not bind to library-expressing or removing library-expressing phage that do not bind to ligand-expressing phage; and selecting the ligand-expressing phage/library-expressing phage pairs. In some embodiments, the methods further comprise isolating polynucleotides from the phage pairs and amplifying the polynucleotides to produce a polynucleotide hybrid comprising polynucleotides from the ligand-expressing phage and the library-expressing phage.

[0016] In some embodiments, the methods comprise isolating polynucleotide hybrids from a plurality of phage pairs, thereby forming a mixture of polynucleotide hybrids. In some embodiments, the methods comprise contacting the mixture of hybrid polynucleotides to a cDNA library under conditions to allow for polynucleotide hybridization, thereby hybridizing a hybrid polynucleotide to a cDNA in the cDNA library; and determining the nucleotide sequence of the hybridized hybrid polynucleotide, thereby identifying a monomer domain that specifically binds to the polypeptide encoded by the cDNA. In some embodiments, the monomer domain library is expressed on the surface of phage to form library-expressing phage and the ligands are expressed on the surface of phage to form ligand-expressing phage, and the selected complexes comprise a library-expressing phage bound to a ligand-expressing phage and the method comprises: dividing the selected monomer domains or multimers into a first and a second portion, linking the monomer domains or multimers of the first portion to a solid surface and contacting a phage-displayed ligand library to the monomer domains or multimers of the first portion to identify target ligand phage that binds to a monomer domain or multimer of the first portion; infecting phage displaying the monomer domains or multimers of the second portion into bacteria to express the phage; and contacting the target ligand phage to the expressed phage to form phage pairs comprised of a target ligand phage and a phage displaying a monomer domain or multimer.

[0017] In some embodiments, the methods further comprise isolating a polynucleotide from each phage of the phage pair, thereby identifying a multimer or monomer domain that binds to the ligand in the phage pair. In some embodiments, the methods further comprise amplifying the polynucleotides to produce a polynucleotide hybrid comprising polynucleotides from the target ligand phage and the library phage.

[0018] In some embodiments, the methods comprise isolating and amplifying polynucleotide hybrids from a plurality of phage pairs, thereby forming a mixture of polynucleotide hybrids. In some embodiments, the methods comprise contacting the mixture of hybrid polynucleotides to a cDNA library under conditions to allow for hybridization, thereby hybridizing a hybrid polynucleotide to a cDNA in the cDNA library; and determining the nucleotide sequence of the associated hybrid polynucleotide, thereby identifying a monomer domain that specifically binds to the ligand encoded by the cDNA associated cDNA.

[0019] The present invention provides methods for identifying monomers and multimers that bind to a target molecule. In some embodiments, the method comprises: providing a library of monomer domains; screening the library of monomer domains for affinity to a first target molecule; and identifying at least one monomer domain that binds to at least one target molecule. In some embodiments, the monomer domains each bind an ion

[0020] In some embodiments, the ion is selected from calcium or zinc. In some embodiments, the monomer domain is selected from the group consisting of an A domain, EGF domain, EF Hand, Cadherin domain, C-type lectin, C2 domain, Annexin, Gla-domain, Trombospondin type 3 domain and zinc finger.

[0021] In some embodiments, the method comprises providing a library of monomer domains; screening the library of monomer domains for affinity to a first target molecule; and identifying at least one monomer domain that binds to at least one target molecule. In some embodiments, the method further comprises linking the identified monomer domains to a second monomer domain to form a library of multimers, each multimer comprising at least two monomer domains; screening the library of multimers for the ability to bind to the first target molecule; and identifying a multimer that binds to the first target molecule.

[0022] Suitable monomer domains include those that are from 25 and 500 amino acids, 100 and 150 amino acids, or 25 and 50 amino acids in length.

[0023] In some embodiments, each monomer domain of the selected multimer binds to the same target molecule. In some embodiments, the selected multimer comprises at least three monomer domains. In some embodiments, the selected multimer comprises three to ten monomer domains. In some embodiments, the selected multimer comprises four monomer domains. In some embodiments, at least three monomer domains bind to the same target molecule.

[0024] In some embodiments, the monomer domain is an LDL receptor class A domain monomer comprising the following sequence:

[0025] CₐX₃₋₁₅C_{b}X₃₋₁₅C_{c}X₆₋₇C_{d}(D,N)X₄CₑX₄₋₆DEX₂₋₈C_{f}

[0026] wherein C is cysteine, Xₙ₋ₘ represents between n and m number of independently selected amino acids, and (D,N) indicates that the position can be either D or N; and wherein Cₐ-C_{c}, C_{b}-Cₑ and C_{d}-C_{f} form disulfide bonds.

[0027] In some embodiments, the monomer domain is an LDL receptor class A domain monomer comprising the following sequence:

[0028] CₐX₆₋₇C_{b}X₄₋₅C_{c}X₆C_{d}X₅CₑX₈₋₁₀C_{f}

[0029] wherein X is defined as follows:

| | | | | |
|---|---|---|---|---|
| C | X(6,7) | C | X(4,5) | C |

| X1 | X2 | X3 | X4 | X5 | X6 | X1 | X2 | X3 | X4 |
|---|---|---|---|---|---|---|---|---|---|
| A | A | A | A | A | A | A | A | | A |
| | C | | | | | | | | C |
| D | D | D | D | | | D | D | D | D |
| E | E | E | E | | E | E | | E | E |
| F | | F | F | F | F | F | | | F |
| G | G | G | G | | | G | G | G | G |
| H | H | H | H | H | H | H | H | H | H |
| | I | | | I | I | | | | I |
| K | K | K | K | K | K | K | | K | K |
| L | L | | L | L | L | L | | L | L |
| M | M | | M | M | M | | | | M |
| N | N | N | N | | N | N | N | N | N |
| P | P | P | | | P | P | | | |
| Q | Q | Q | Q | Q | Q | Q | Q | Q | Q |
| R | R | R | R | R | R | R | R | R | R |
| S | S | S | S | S | S | S | S | S | S |
| T | T | T | T | T | T | T | T | T | T |
| V | V | V | | V | V | V | V | | V |
| | W | W | | W | | | | | |
| | Y | Y | Y | Y | | Y | Y | | |

| | | | | |
|---|---|---|---|---|
| C | X(6,7) | C | X(4,5) | C |

| X1 | X2 | X3 | X4 | X5 | X6 | X7 | X1 | X2 | X3 | X4 | X5 |
|---|---|---|---|---|---|---|---|---|---|---|---|
| A | A | | | | | A | A | | A | A | A |
| D | D | D | D | D | | | D | D | D | D | D |
| E | E | | E | E | | E | E | E | E | E | E |
| F | | F | F | | F | | | | | F | |
| G | G | G | G | G | | G | G | G | G | G | G |
| H | H | | H | | H | | H | | H | H | H |
| | | | | | | | | I | I | I | I |
| K | | K | K | K | | K | K | K | K | K | K |
| L | L | L | | L | L | L | L | L | | L | L |
| | | | M | | | M | | | | | M |
| N | N | N | N | N | | | N | N | N | N | N |
| P | P | P | | P | | | P | P | P | P | |
| | | Q | | Q | | | Q | Q | Q | Q | Q |
| R | R | R | R | R | | R | R | R | R | R | R |
| S | S | S | S | | | S | S | S | S | S | |
| T | T | T | T | | | T | T | T | T | T | T |
| | | V | V | | V | V | V | V | | V | V |
| | | | | | W | | W | | | W | |
| | | Y | | | | | | | Y | Y | |

| | | | | |
|---|---|---|---|---|
| C | X(6) | C | X(5) | C |

| X1 | X2 | X3 | X4 | X5 | X6 | X1 | X2 | X3 | X4 | X5 |
|---|---|---|---|---|---|---|---|---|---|---|
| A | A | A | A | A | A | | A | A | A | |
| | D | D | D | D | | D | D | D | D | D |
| | E | E | E | E | E | | E | E | E | E |
| F | F | F | F | F | F | | F | F | F | |
| | G | G | G | G | | | G | G | | |
| | H | H | H | | H | | H | H | H | H |
| I | | I | I | | I | | | I | I | |
| K | K | K | K | K | K | | K | K | K | |
| L | L | L | L | L | L | | L | L | L | |
| | M | M | M | M | M | | M | M | | |
| | N | N | N | N | | N | N | N | N | N |
| | P | P | P | | P | | | | P | |
| | Q | Q | Q | Q | Q | | Q | Q | Q | Q |
| | R | R | R | R | R | | R | R | R | |
| | S | S | S | S | | | S | S | S | S |
| T | T | T | T | T | T | | T | T | T | T |
| V | V | V | V | V | V | | V | V | V | |
| | W | | W | W | W | | W | W | W | |
| Y | Y | Y | Y | Y | Y | | Y | Y | Y | |

| | | |
|---|---|---|
| C | X(8,10) | C |

| X1 | X2 | X3 | X4 | X5 | X6 | X7 | X8 |
|---|---|---|---|---|---|---|---|
| A | | A | A | | | A | A |
| D | D | D | | D | | D | D |
| E | | E | E | | E | E | E |
| | | F | | | | F | F |
| G | G | G | G | | | G | G |
| H | H | H | | | | H | H |
| I | | | | | | I | I |
| K | | K | | | | K | K |
| L | | L | L | | | L | L |
| M | | M | M | | | M | M |
| | N | N | | | | N | N |
| P | | | | | | | P |
| Q | Q | Q | | | | Q | Q |
| R | | R | R | | | R | R |
| S | S | S | S | | | S | S |
| T | T | | T | | | T | |
| V | | | | | | V | |
| | | W | | | | W | |
| | Y | Y | | | | Y | |

| | | |
|---|---|---|
| C | X(8,10) | C |

| X1 | X2 | X3 | X4 | X5 | X6 | X7 | X8 | X9 |
|---|---|---|---|---|---|---|---|---|
| A | | A | | | | A | A | A |
| D | D | | | D | | | D | D |
| | | | | | E | E | E | E |
| F | | | | | | | | |
| G | | G | | | | G | G | |
| | | H | | | | H | | H |
| L | | | | | | L | | L |
| M | | | | | | M | | |
| | N | | | | | N | N | N |
| P | | | | | | P | P | |
| | | Q | | | | | Q | Q |
| | | R | | | | R | | |
| S | | | S | | | S | | S |
| T | | | T | | | | | |
| V | | | | | | | V | |
| | Y | | Y | | | | Y | |

| | | |
|---|---|---|
| C | X(8,10) | C |

| X1 | X2 | X3 | X4 | X5 | X6 | X7 | X8 | X9 | X10 |
|---|---|---|---|---|---|---|---|---|---|
| | | | A | | | A | A | A | A |
| | D | D | | D | | D | D | D | |
| E | | | E | | E | E | E | E | E |
| | | F | | | | | | | |
| G | | G | | | | G | | G | |
| | | H | | | | | H | H | H |
| | | | | | | | I | I | I |
| K | | K | | | | K | K | K | |
| L | | | L | | | L | L | L | L |
| | | | | | | M | M | | M |
| | N | N | | | | N | N | | N |
| P | | | | | | P | P | | P |
| Q | | Q | | | | | Q | Q | Q |
| R | | R | | | | | R | | R |
| S | S | S | S | | | S | S | S | |
| | | | T | | | T | | T | T |
| | | | | | | | | V | V |
| | | W | | | | W | | | |
| | | Y | | | | | | Y | Y |

[0030] In some embodiments, the LDL receptor class A domain monomers each comprise SEQ ID NO:201.

[0031] In some embodiments, the monomer domain is an EGF domain monomer comprising the following sequence:

[0032] CₐX₃₋₁₄C_{b}X₃₋₇C_{c}X₄₋₁₆C_{d}X₁₋₂CₑX₈₋₂₃C_{f}

[0033] wherein C is cysteine, Xₙ₋ₘ represents between n and m number of independently selected amino acids; and wherein Cₐ-C_{c}, C_{b}-Cₑ and C_{d}-C_{f} form disulfide bonds.

[0034] In some embodiments, the monomer domain is an EGF domain monomer comprising the following sequence:

[0035] CₐX₄₋₆C_{b}X₃₋₅C_{c}X₈₋₉C_{d}X₁CₑX₈₋₁₂C_{f}

[0036] wherein X is defined as follows:

| | | | | |
|---|---|---|---|---|
| C | X(4,6) | C | X(3,5) | C |

| X1 | X2 | X3 | X4 | X1 | X2 | X3 |
|---|---|---|---|---|---|---|
| A | A | A | A | A | | A |
| D | D | D | | D | | D |
| E | E | E | E | E | | E |
| F | | | | | F | F |
| G | G | G | G | G | G | G |
| H | H | H | | H | H | H |
| I | | | | | | I |
| K | K | K | | K | | K |
| L | L | L | | | L | L |
| | M | M | M | | | |
| N | N | N | N | N | N | N |
| P | P | P | P | P | | |
| Q | | Q | Q | Q | Q | Q |
| R | R | R | R | | | R |
| S | S | S | S | S | S | S |
| T | T | T | T | T | T | T |
| V | | V | | V | | V |
| W | | W | | | | |
| | Y | | Y | | Y | Y |

| | | | | |
|---|---|---|---|---|
| C | X(4,6) | C | X(3,5) | C |

| X1 | X2 | X3 | X4 | X5 | X1 | X2 | X3 | X4 |
|---|---|---|---|---|---|---|---|---|
| A | A | A | A | A | A | A | A | A |
| D | D | | D | | D | D | | D |
| E | E | E | E | | E | E | | E |
| | F | F | F | F | F | F | | F |
| G | G | G | G | G | G | G | G | |
| | H | H | H | | H | H | | H |
| I | I | | I | I | I | | | I |
| K | K | | K | K | K | K | | K |
| L | L | L | L | L | L | L | | L |
| | M | | | M | M | | | M |
| | N | N | N | N | N | N | | N |
| | P | P | P | P | P | P | | |
| Q | Q | Q | | Q | Q | Q | | Q |
| R | R | R | R | R | R | R | | R |
| S | S | S | S | S | S | S | | S |
| T | T | T | T | T | T | T | T | T |
| V | V | | | V | V | | | V |
| | | W | | | | | | |
| | | Y | | Y | | Y | | |

| | | | | |
|---|---|---|---|---|
| C | X(4,6) | C | X(3,5) | C |

| X1 | X2 | X3 | X4 | X5 | X6 | X1 | X2 | X3 | X4 | X5 |
|---|---|---|---|---|---|---|---|---|---|---|
| A | A | A | A | A | A | A | A | A | A | A |
| | | | | | | C | | | | |
| D | D | D | D | D | D | D | D | D | | D |
| E | E | E | E | E | E | E | E | E | | E |
| F | F | F | F | F | | F | | F | F | F |
| G | G | G | G | G | G | G | G | G | G | |
| | H | H | H | H | | H | H | H | H | H |
| I | I | I | I | I | I | | I | | | I |
| K | K | K | K | K | K | K | K | K | | K |
| L | L | L | L | L | L | L | L | L | | L |
| M | M | M | M | | M | M | M | | | M |
| N | N | N | N | N | N | N | N | N | | N |
| P | P | P | P | P | P | P | P | | | |
| Q | Q | Q | Q | Q | Q | Q | Q | Q | Q | Q |
| R | R | R | R | R | R | R | R | R | | R |
| S | S | S | S | S | S | S | S | S | S | S |
| T | T | T | T | | T | | T | T | T | T |
| V | V | V | V | V | V | V | V | | V | V |
| | | W | | | | | | | | |
| Y | Y | | | Y | Y | Y | Y | Y | | |

| | | | | |
|---|---|---|---|---|
| C | X(8,9) | C | X(1) | C |

| X1 | X2 | X3 | X4 | X5 | X6 | X7 | X8 | X1 |
|---|---|---|---|---|---|---|---|---|
| A | A | A | A | A | A | A | A | A |
| | | C | | | | | | |
| D | D | D | D | D | D | | D | D |
| E | E | E | E | E | E | | E | E |
| F | | F | F | F | | F | F | F |
| G | | G | G | G | G | | | G |
| H | | H | H | H | H | H | H | H |
| I | | I | I | I | | I | I | I |
| K | K | K | K | K | K | | K | K |
| L | L | L | L | L | L | L | L | L |
| M | | M | M | | M | | M | M |
| N | N | N | N | N | N | | N | N |
| | P | P | P | P | | P | | P |
| Q | Q | Q | Q | Q | Q | | Q | Q |
| R | R | R | R | R | R | R | R | R |
| S | S | S | S | S | S | | S | S |
| T | T | T | T | T | T | T | T | T |
| V | V | V | V | V | V | V | V | V |
| W | | | W | W | W | | W | W |
| Y | | Y | Y | | Y | Y | Y | Y |

| | | | | |
|---|---|---|---|---|
| C | X(8,9) | C | X(1) | C |

| X1 | X2 | X3 | X4 | X5 | X6 | X7 | X8 | X9 |
|---|---|---|---|---|---|---|---|---|
| A | A | A | A | A | A | A | | A |
| D | D | D | D | D | D | D | | |
| | E | E | E | E | E | E | | E |
| F | F | F | | F | | | F | |
| | | G | G | G | G | G | | |
| H | H | H | | | | | H | H |
| I | | | | | | | I | |
| K | | | | K | | K | | K |
| L | L | L | | L | | L | | L |
| M | M | | | | M | M | | |
| N | N | N | N | N | N | | | |
| | P | | P | P | | | P | |
| Q | Q | | Q | Q | | Q | | Q |
| R | R | R | R | R | R | R | R | |
| S | S | S | S | S | S | S | | S |
| T | | T | T | T | T | T | | T |
| V | V | V | | | V | | V | V |
| | | | | | | | W | |
| Y | Y | Y | | | Y | | Y | Y |

| | | | | |
|---|---|---|---|---|
| C | X(8,9) | C | X(1) | C |

| | | | | | | | |
|---|---|---|---|---|---|---|---|
| X1 | X2 | X3 | X4 | X5 | X6 | X7 | X8 |

| | | |
|---|---|---|
| C | X(8/12) | C |

| X1 | X2 | X3 | X4 | X5 | X6 | X7 | X8 |
|---|---|---|---|---|---|---|---|
| A | A | A | | A | | A | A |
| D | D | | | D | D | D | D |
| E | E | E | | E | | E | E |
| F | F | | F | F | | F | F |
| | G | G | | G | G | | |
| H | H | H | H | H | | H | H |
| | | | I | I | | I | I |
| K | K | K | | K | | K | K |
| L | L | L | L | L | | L | L |
| M | | | M | M | | | M |
| N | N | N | | N | | N | N |
| P | P | P | | | | P | |
| Q | Q | | | Q | | Q | Q |
| R | R | R | R | R | | R | R |
| S | S | S | | S | S | S | S |
| T | T | T | T | T | | T | T |
| V | V | | | V | | V | |
| W | | | W | | | | |
| Y | Y | Y | Y | Y | | Y | Y |

| | | |
|---|---|---|
| C | X(8/12) | C |

| X1 | X2 | X3 | X4 | X5 | X6 | X7 | X8 | X9 | X10 | X11 | X12 |
|---|---|---|---|---|---|---|---|---|---|---|---|
| A | A | | A | A | A | A | A | A | | A | A |
| D | D | D | D | D | | D | D | D | | D | D |
| E | E | E | E | E | | E | E | E | E | E | E |
| F | F | | F | F | F | F | | F | F | F | F |
| G | | G | | G | G | G | G | G | G | G | G |
| H | H | | H | H | | H | | H | H | H | H |
| I | I | | | I | I | | I | I | I | | I |
| K | K | | | K | K | K | K | K | K | K | K |
| L | L | | L | L | L | L | L | L | L | L | |
| | M | | M | M | M | M | M | M | M | M | M |
| N | N | N | | N | | N | N | N | N | N | N |
| P | P | P | | | P | P | P | | P | P | |
| Q | Q | | Q | Q | Q | Q | Q | Q | Q | Q | Q |
| R | R | | R | R | R | R | R | | R | R | R |
| S | S | S | S | S | S | S | S | S | S | S | S |
| T | T | | T | T | T | T | T | T | T | T | T |
| V | V | | | V | V | V | V | V | | V | V |
| | | | W | | W | W | | | W | | |
| Y | | | Y | Y | Y | | Y | | | Y | Y |

[0037] In some embodiments, the method further comprises screening the library of monomer domains for affinity to a second target molecule; identifying a monomer domain that binds to a second target molecule; linking at least one monomer domain with affinity for the first target molecule with at least one monomer domain with affinity for the second target molecule, thereby forming a multimer with affinity for the first and the second target molecule.

[0038] In some embodiments, the methods comprise identifying a multimer with an improved avidity for the target compared to the avidity of a monomer domain alone for the same target molecule. In some embodiments, the avidity of the multimer is at least two times the avidity of a monomer domain alone.

[0039] In some embodiments, the screening of the library of monomer domains and the identifying of monomer domains occurs simultaneously. In some embodiments, the screening of the library of multimers and the identifying of multimers occurs simultaneously.

[0040] In some embodiments, the polypeptide domain is selected from the group consisting of an EGF-like domain, a Kringle-domain, a fibronectin type I domain, a fibronectin type II domain, a fibronectin type III domain, a PAN domain, a Gla domain, a SRCR domain, a Kunitz/Bovine pancreatic trypsin Inhibitor domain, a Kazal-type serine protease inhibitor domain, a Trefoil (P-type) domain, a von Willebrand factor type C domain, an Anaphylatoxin-like domain, a CUB domain, a thyroglobulin type I repeat, LDL-receptor class A domain, a Sushi domain, a Link domain, a Thrombospondin type I domain, an Immunoglobulin-like domain, a C-type lectin domain, a MAM domain, a von Willebrand factor type A domain, a Somatomedin B domain, a WAP-type four disulfide core domain, a F5/8 type C domain, a Hemopexin domain, an SH2 domain, an SH3 domain, a Laminin-type EGF-like domain, and a C2 domain

[0041] In some embodiments, the methods comprise a further step of mutating at least one monomer domain, thereby providing a library comprising mutated monomer domains. In some embodiments, the mutating step comprises recombining a plurality of polynucleotide fragments of at least one polynucleotide encoding a monomer domain. In some embodiments, the mutating step comprises directed evolution. In some embodiments the mutating step comprises combining different loop sequences. In some embodiments, the mutating step comprises site-directed mutagenesis. In some embodiments , the mutating step comprises site-directed recombination to create crossovers that result in the generation of sequences that are identical to human sequences.

[0042] In some embodiments, the methods further comprise: screening the library of monomer domains for affinity to a second target molecule; identifying a monomer domain that binds to a second target molecule; linking at least one monomer domain with affinity for the first target molecule with at least one monomer domain with affinity for the second target molecule, thereby forming a library of multimers; screening the library of multimers for the ability to bind to the first and second target molecule; and identifying a multimer that binds to the first and second target molecule, thereby identifying a multimer that specifically binds a first and a second target molecule.

[0043] The present invention also provides methods of producing a polypeptide comprising the monomer domains and multimers identified according to the methods described above. In some embodiments, the monomer domains or multimers are produced by recombinant gene expression.

[0044] Certain methods of the present invention further comprise: providing a second library of monomer domains; screening the second library of monomer domains for affinity to at least a second target molecule; identifying a second monomer domain that binds to the second target molecule; linking the identified monomer domains that bind to the first target molecule or the second target molecule, thereby forming a library of multimers; screening the library of multimers for the ability to bind to the first and second target molecule; and identifying a multimer that binds to the first and second target molecules.

[0045] In some embodiments, the target molecule is selected from the group consisting of a viral antigen, a bacterial antigen, a fungal antigen, an enzyme, a cell surface protein, an enzyme inhibitor, a reporter molecule, a serum protein, and a receptor. In some embodiments, the viral antigen is a polypeptide required for viral replication. In some embodiments, the first and at least second target molecules are different components of the same viral replication system. In some embodiments, the selected multimer binds to at least two serotypes of the same virus.

[0046] In some embodiments, the library of monemr domains is expressed as a phage display, ribosome display, polysome display, or cell surface display. In some embodiments, the library of monomer domains is presented on a microarray.

[0047] In some embodiments, the monomer domains are linked by a polypeptide linker. In some embodiments, the polypeptide linker is a linker naturally-associated with the monomer domain. In some embodiments, the polypeptide linker is a variant of a linker naturally-associated with the monomer domain. In some embodiments, the linking step comprises linking the monomer domains with a variety of linkers of different lengths and composition.

[0048] In some embodiments, the domains form a secondary structure by the formation of disulfide bonds. In some embodiments, the multimers comprise an A domain connected to a monomer domain by a polypeptide linker. In some embodiments, the linker is from 1-20 amino acids inclusive. In some embodiments, the linker is made up of 5-7 amino acids. In some embodiments, the linker is 6 amino acids in length. In some embodiments, the linker comprises the following sequence, A₁A₂A₃A₄A₅A₆ (SEQ ID NO. 244), wherein A₁ is selected from the amino acids A, P, T, Q, E and K; A₂ and A₃ are any amino acid except C, F, Y, W, or M; A₄ is selected from the amino acids S, G and R; A₅ is selected from the amino acids H, P, and R; A₆ is the amino acid, T. In some embodiments, the linker comprises a naturally-occurring sequence between the C-terminal cysteine of a first A domain and the N-terminal cysteine of a second A domain.

[0049] In some embodiments, the multimers comprise a C2 domain connected to a monomer domain by a polypeptide linker. In some embodiments, each C2 monomer domain differs from the corresponding wild-type C2 monomer domain in that at least one amino acid residue constituting part of the loop regions has been substituted with another amino acid residue; at least one amino acid residue constituting part of the loop regions has been deleted and/or at least one amino acid residue has been inserted in at least one of the loop regions. In some embodiments, the C2 domain comprises loop regions 1, 2, and 3 and the amino acid sequences outside of the loop regions 1, 2 and 3 are identical for all C2 monomer domains present in the polypeptide multimer. In some of these embodiments, the linker is between 1-20 amino acid residues in length. In some embodiments, the linker is between 10-12 amino acid residues in length. In some embodiments, the linker is 11 amino acid residues in length.

[0050] The present invention also provides polypeptides comprising the multimers or monomer domains selected as described above.

[0051] The present invention also provides polynucleotides encoding the multimers or monomer domains selected as described above.

[0052] The present invention also provides libraries of multimers or monomer domains formed as described above.

[0053] The present invention also provides methods for identifying a multimer that binds to at least one target molecule, comprising the steps of: providing a library of multimers, wherein each multimer comprises at least two monomer domains and wherein each monomer domain exhibits a binding specificity for a target molecule; and screening the library of multimers for target molecule-binding multimers. In some embodiments, the methods further comprise identifying target molecule-binding multimers having an avidity for the target molecule that is greater than the avidity of a single monomer domain for the target molecule. In some embodiments, one or more of the multimers comprises a monomer domain that specifically binds to a second target molecule.

[0054] Alternative methods for identifying a multimer that binds to a target molecule include methods comprising providing a library of monomer domains and/or immuno domains; screening the library of monomer domains and/or immuno domain for affinity to a first target molecule; identifying at least one monomer domain and/or immuno domain that binds to at least one target molecule; linking the identified monomer domain and/or immuno domain to a library of monomer domains and/or immuno domains to form a library of multimers, each multimer comprising at least two monomer domains, immuno domains or combinations thereof; screening the library of multimers for the ability to bind to the first target molecule; and identifying a multimer that binds to the first target molecule.

[0055] In some embodiments, the monomer domains each bind an ion. In some embodiments, the ion is selected from the group consisting of calcium and zinc. In some embodiments, the monomer domains are selected from the group consisting of an A domain, EGF domain, EF Hand, Cadherin domain, C-type lectin, C2 domain, Annexin, Gla-domain, Trombospondin type 3 domain and zinc finger.

[0056] The present invention also provides libraries of multimers. In some embodiments, each multimer comprises at least two monomer domains connected by a linker; each monomer domain exhibits a binding specificity for a target molecule; and each monomer domain is a non-naturally occurring monomer domain. In some embodiments, each multimer comprises at least two monomer domains connected by a linker; and each monomer domain binds an ion.

[0057] In some embodiments, the ion is selected from calcium and zinc. In some embodiments, the polypeptide domains are selected from the group consisting of consisting of an A domain, EGF domain, EF Hand, Cadherin domain, C-type lectin, C2 domain, Annexin, Gla-domain, Trombospondin type 3 domain and zinc finger.

[0058] In some embodiments, the linker comprises at least 3 amino acid residues. In some embodiments, the linker comprises at least 6 amino acid residues. In some embodiments, the linker comprises at least 10 amino acid residues.

[0059] The present invention also provides polypeptides comprising at least two monomer domains separated by a heterologous linker sequence. In some embodiments, each monomer domain specifically binds to a target molecule; and each monomer domain is a non-naturally occurring protein monomer domain. In some embodiments, each monomer domain binds an ion.

[0060] In some embodiments, the ion is selected from calcium and zinc. In some embodiments, the monomer domain is selected from the group consisting of an A domain, EGF domain, EF Hand, Cadherin domain, C-type lectin, C2 domain, Annexin, Gla-domain, Trombospondin type 3 domain and zinc finger.

[0061] In some embodiments, polypeptides comprise a first monomer domain that binds a first target molecule and a second monomer domain that binds a second target molecule. In some embodiments, the polypeptides comprise two monomer domains, each monomer domain having a binding specificity that is specific for a different site on the same target molecule. In some embodiments, the polypeptides further comprise a monomer domain having a binding specificity for a second target molecule.

[0062] In some embodiments, the monomer domain is an LDL receptor class A domain monomer comprising the following sequence:

[0063] CₐX₃₋₁₅C_{b}X₃₋₁₅C_{c}X₆₋₇C_{d}(D,N)X₄CₑX₄₋₆DEX₂₋₈C_{f}

[0064] wherein C is cysteine, Xₙ₋ₘ represents between n and m number of independently selected amino acids, and (D,N) indicates that the position can be either D or N; and wherein Cₐ-C_{c}, C_{b}-Cₑ and C_{d}-C_{f} form disulfide bonds.

[0065] In some embodiments, the monomer domain is an LDL receptor class A domain monomer comprising the following sequence:

[0066] CₐX₆₋₇C_{b}X₄₋₅C_{c}X₆C_{d}X₅CₑX₈₋₁₀C_{f}

[0067] wherein X is defined as follows:

| | | | | |
|---|---|---|---|---|
| C | X(6,7) | C | X(4,5) | C |

| X1 | X2 | X3 | X4 | X5 | X6 | X1 | X2 | X3 | X4 |
|---|---|---|---|---|---|---|---|---|---|
| A | A | A | A | A | A | A | A | | A |
| | C | | | | | | | | C |
| D | D | D | D | | | D | D | D | D |
| E | E | E | E | | E | E | | E | E |
| F | | F | F | F | F | F | | | F |
| G | G | G | G | | | G | G | G | G |
| H | H | H | H | H | H | H | H | H | H |
| | I | | | I | I | | | | I |
| K | K | K | K | K | K | K | | K | K |
| L | L | | L | L | L | L | | L | L |
| M | M | | M | M | M | | | | M |
| N | N | N | N | | N | N | N | N | N |
| P | P | P | | | P | P | | | |
| Q | Q | Q | Q | Q | Q | Q | Q | Q | Q |
| R | R | R | R | R | R | R | R | R | R |
| S | S | S | S | S | S | S | S | S | S |
| T | T | T | T | T | T | T | T | T | T |
| V | V | V | | V | V | V | V | | V |
| | W | W | | W | | | | | |
| | Y | Y | Y | Y | | Y | Y | | |

| | | | | |
|---|---|---|---|---|
| C | X(6,7) | C | X(4,5) | C |

| X1 | X2 | X3 | X4 | X5 | X6 | X7 | X1 | X2 | X3 | X4 | X5 |
|---|---|---|---|---|---|---|---|---|---|---|---|
| A | A | | | | | A | A | | A | A | A |
| D | D | D | D | D | | | D | D | D | D | D |
| E | E | | E | E | | E | E | E | E | E | E |
| F | | F | F | | F | | | | | F | |
| G | G | G | G | G | | G | G | G | G | G | G |
| H | H | | H | | H | | H | | H | H | H |
| | | | | | | | | I | I | I | I |
| K | | K | K | K | | K | K | K | K | K | K |
| L | L | L | | L | L | L | L | L | | L | L |
| | | | M | | | M | | | | | M |
| N | N | N | N | N | | | N | N | N | N | N |
| P | P | P | | P | | | P | P | P | P | |
| | | Q | | Q | | | Q | Q | Q | Q | Q |
| R | R | R | R | R | | R | R | R | R | R | R |
| S | S | S | S | | | S | S | S | S | S | |
| T | T | T | T | | | T | T | T | T | T | T |
| | | V | V | | V | V | V | V | | V | V |
| | | | | | W | | W | | | W | |
| | | Y | | | | | | | Y | Y | |

| | | | | |
|---|---|---|---|---|
| C | X(6) | C | X(5) | C |

| X1 | X2 | X3 | X4 | X5 | X6 | X1 | X2 | X3 | X4 | X5 |
|---|---|---|---|---|---|---|---|---|---|---|
| A | A | A | A | A | A | | A | A | A | |
| | D | D | D | D | | D | D | D | D | D |
| | E | E | E | E | E | | E | E | E | E |
| F | F | F | F | F | F | | F | F | F | |
| | G | G | G | G | | | G | G | | |
| | H | H | H | | H | | H | H | H | H |
| I | | I | I | | I | | | I | I | |
| K | K | K | K | K | K | | K | K | K | |
| L | L | L | L | L | L | | L | L | L | |
| | M | M | M | M | M | | M | M | | |
| | N | N | N | N | | N | N | N | N | N |
| | P | P | P | | P | | | | P | |
| | Q | Q | Q | Q | Q | | Q | Q | Q | Q |
| | R | R | R | R | R | | R | R | R | |
| | S | S | S | S | | | S | S | S | S |
| T | T | T | T | T | T | | T | T | T | T |
| V | V | V | V | V | V | | V | V | V | |
| | W | | W | W | W | | W | W | W | |
| Y | Y | Y | Y | Y | Y | | Y | Y | Y | |

| | | |
|---|---|---|
| C | X(8,10) | C |

| X1 | X2 | X3 | X4 | X5 | X6 | X7 | X8 |
|---|---|---|---|---|---|---|---|
| A | | A | A | | | A | A |
| D | D | D | | D | | D | D |
| E | | E | E | | E | E | E |
| | | F | | | | F | F |
| G | G | G | G | | | G | G |
| H | H | H | | | | H | H |
| I | | | | | | I | I |
| K | | K | | | | K | K |
| L | | L | L | | | L | L |
| M | | M | M | | | M | M |
| | N | N | | | | N | N |
| P | | | | | | | P |
| Q | Q | Q | | | | Q | Q |
| R | | R | R | | | R | R |
| S | S | S | S | | | S | S |
| T | T | | T | | | T | |
| V | | | | | | V | |
| | | W | | | | W | |
| | Y | Y | | | | Y | |

| | | |
|---|---|---|
| C | X(8,10) | C |

| X1 | X2 | X3 | X4 | X5 | X6 | X7 | X8 | X9 |
|---|---|---|---|---|---|---|---|---|
| A | | A | | | | A | A | A |
| D | D | | | D | | | D | D |
| | | | | | E | E | E | E |
| F | | | | | | | | |
| G | | G | | | | G | G | |
| | | H | | | | H | | H |
| L | | | | | | L | | L |
| M | | | | | | M | | |
| | N | | | | | N | N | N |
| P | | | | | | P | P | |
| | | Q | | | | | Q | Q |
| | | R | | | | R | | |
| S | | | S | | | S | | S |
| T | | | T | | | | | |
| V | | | | | | | V | |
| | Y | | Y | | | | Y | |

| | | |
|---|---|---|
| C | X(8,10) | C |

| X1 | X2 | X3 | X4 | X5 | X6 | X7 | X8 | X9 | X10 |
|---|---|---|---|---|---|---|---|---|---|
| | | | A | | | A | A | A | A |
| | D | D | | D | | D | D | D | |
| E | | | E | | E | E | E | E | E |
| | | F | | | | | | | |
| G | | G | | | | G | | G | |
| | | H | | | | | H | H | H |
| | | | | | | | I | I | I |
| K | | K | | | | K | K | K | |
| L | | | L | | | L | L | L | L |
| | | | | | | M | M | | M |
| | N | N | | | | N | N | | N |
| P | | | | | | P | P | | P |
| Q | | Q | | | | | Q | Q | Q |
| R | | R | | | | | R | | R |
| S | S | S | S | | | S | S | S | |
| | | | T | | | T | | T | T |
| | | | | | | | | V | V |
| | | W | | | | W | | | |
| | | Y | | | | | | Y | Y |

[0068] In some embodiments, the LDL receptor class A domain monomers each comprise SEQ ID NO:201.

[0069] In some embodiments, the monomer domain is an EGF domain monomer comprising the following sequence:

[0070] CₐX₃₋₁₄C_{b}X₃₋₇C_{c}X₄₋₁₆C_{d}X₁₋₂CₑX₈₋₂₃C_{f}

[0071] wherein C is cysteine, Xₙ₋ₘ represents between n and m number of independently selected amino acids; and wherein Cₐ-C_{c}, C_{b}-Cₑ and C_{d}-C_{f} form disulfide bonds.

[0072] In some embodiments, the monomer domain is an EGF domain monomer comprising the following sequence:

[0073] CₐX₄₋₆C_{b}X₃₋₅C_{c}X₈₋₉C_{d}X₁CₑX₈₋₁₂C_{f}

[0074] wherein X is defined as follows:

| | | | | |
|---|---|---|---|---|
| C | X(4,6) | C | X(3,5) | C |

| X1 | X2 | X3 | X4 | X1 | X2 | X3 |
|---|---|---|---|---|---|---|
| A | A | A | A | A | | A |
| D | D | D | | D | | D |
| E | E | E | E | E | | E |
| F | | | | | F | F |
| G | G | G | G | G | G | G |
| H | H | H | | H | H | H |
| I | | | | | | I |
| K | K | K | | K | | K |
| L | L | L | | | L | L |
| | M | M | M | | | |
| N | N | N | N | N | N | N |
| P | P | P | P | P | | |
| Q | | Q | Q | Q | Q | Q |
| R | R | R | R | | | R |
| S | S | S | S | S | S | S |
| T | T | T | T | T | T | T |
| V | | V | | V | | V |
| W | | W | | | | |
| | Y | | Y | | Y | Y |

| | | | | |
|---|---|---|---|---|
| C | X(4,6) | C | X(3,5) | C |

| X1 | X2 | X3 | X4 | X5 | X1 | X2 | X3 | X4 |
|---|---|---|---|---|---|---|---|---|
| A | A | A | A | A | A | A | A | A |
| D | D | | D | | D | D | | D |
| E | E | E | E | | E | E | | E |
| | F | F | F | F | F | F | | F |
| G | G | G | G | G | G | G | G | |
| | H | H | H | | H | H | | H |
| I | I | | I | I | I | | | I |
| K | K | | K | K | K | K | | K |
| L | L | L | L | L | L | L | | L |
| | M | | | M | M | | | M |
| | N | N | N | N | N | N | | N |
| | P | P | P | P | P | P | | |
| Q | Q | Q | | Q | Q | Q | | Q |
| R | R | R | R | R | R | R | | R |
| S | S | S | S | S | S | S | | S |
| T | T | T | T | T | T | T | T | T |
| V | V | | | V | V | | | V |
| | | W | | | | | | |
| | | Y | | Y | | Y | | |

| | | | | |
|---|---|---|---|---|
| C | X(4,6) | C | X(3,5) | C |

| X1 | X2 | X3 | X4 | X5 | X6 | X1 | X2 | X3 | X4 | X5 |
|---|---|---|---|---|---|---|---|---|---|---|
| A | A | A | A | A | A | A | A | A | A | A |
| | | | | | | C | | | | |
| D | D | D | D | D | D | D | D | D | | D |
| E | E | E | E | E | E | E | E | E | | E |
| F | F | F | F | F | | F | | F | F | F |
| G | G | G | G | G | G | G | G | G | G | |
| | H | H | H | H | | H | H | H | H | H |
| I | I | I | I | I | I | | I | | | I |
| K | K | K | K | K | K | K | K | K | | K |
| L | L | L | L | L | L | L | L | L | | L |
| M | M | M | M | | M | M | M | | | M |
| N | N | N | N | N | N | N | N | N | | N |
| P | P | P | P | P | P | P | P | | | |
| Q | Q | Q | Q | Q | Q | Q | Q | Q | Q | Q |
| R | R | R | R | R | R | R | R | R | | R |
| S | S | S | S | S | S | S | S | S | S | S |
| T | T | T | T | | T | | T | T | T | T |
| V | V | V | V | V | V | V | V | | V | V |
| | | W | | | | | | | | |
| Y | Y | | | Y | Y | Y | Y | Y | | |

| | | | | |
|---|---|---|---|---|
| C | X(8,9) | C | X(1) | C |

| X1 | X2 | X3 | X4 | X5 | X6 | X7 | X8 | X1 |
|---|---|---|---|---|---|---|---|---|
| A | A | A | A | A | A | A | A | A |
| | | C | | | | | | |
| D | D | D | D | D | D | | D | D |
| E | E | E | E | E | E | | E | E |
| F | | F | F | F | | F | F | F |
| G | | G | G | G | G | | | G |
| H | | H | H | H | H | H | H | H |
| I | | I | I | I | | I | I | I |
| K | K | K | K | K | K | | K | K |
| L | L | L | L | L | L | L | L | L |
| M | | M | M | | M | | M | M |
| N | N | N | N | N | N | | N | N |
| | P | P | P | P | | P | | P |
| Q | Q | Q | Q | Q | Q | | Q | Q |
| R | R | R | R | R | R | R | R | R |
| S | S | S | S | S | S | | S | S |
| T | T | T | T | T | T | T | T | T |
| V | V | V | V | V | V | V | V | V |
| W | | | W | W | W | | W | W |
| Y | | Y | Y | | Y | Y | Y | Y |

| | | | | |
|---|---|---|---|---|
| C | X(8,9) | C | X(1) | C |

| X1 | X2 | X3 | X4 | X5 | X6 | X7 | X8 | X9 |
|---|---|---|---|---|---|---|---|---|
| A | A | A | A | A | A | A | | A |
| D | D | D | D | D | D | D | | |
| | E | E | E | E | E | E | | E |
| F | F | F | | F | | | F | |
| | | G | G | G | G | G | | |
| H | H | H | | | | | H | H |
| I | | | | | | | I | |
| K | | | | K | | K | | K |
| L | L | L | | L | | L | | L |
| M | M | | | | M | M | | |
| N | N | N | N | N | N | | | |
| | P | | P | P | | | P | |
| Q | Q | | Q | Q | | Q | | Q |
| R | R | R | R | R | R | R | R | |
| S | S | S | S | S | S | S | | S |
| T | | T | T | T | T | T | | T |
| V | V | V | | | V | | V | V |
| | | | | | | | W | |
| Y | Y | Y | | | Y | | Y | Y |

| | | | | |
|---|---|---|---|---|
| C | X(8,9) | C | X(1) | C |

| | | | | | | | |
|---|---|---|---|---|---|---|---|
| X1 | X2 | X3 | X4 | X5 | X6 | X7 | X8 |

| | | |
|---|---|---|
| C | X(8/12) | C |

| X1 | X2 | X3 | X4 | X5 | X6 | X7 | X8 |
|---|---|---|---|---|---|---|---|
| A | A | A | | A | | A | A |
| D | D | | | D | D | D | D |
| E | E | E | | E | | E | E |
| F | F | | F | F | | F | F |
| | G | G | | G | G | | |
| H | H | H | H | H | | H | H |
| | | | I | I | | I | I |
| K | K | K | | K | | K | K |
| L | L | L | L | L | | L | L |
| M | | | M | M | | | M |
| N | N | N | | N | | N | N |
| P | P | P | | | | P | |
| Q | Q | | | Q | | Q | Q |
| R | R | R | R | R | | R | R |
| S | S | S | | S | S | S | S |
| T | T | T | T | T | | T | T |
| V | V | | | V | | V | |
| W | | | W | | | | |
| Y | Y | Y | Y | Y | | Y | Y |

| | | |
|---|---|---|
| C | X(8/12) | C |

| X1 | X2 | X3 | X4 | X5 | X6 | X7 | X8 | X9 | X10 | X11 | X12 |
|---|---|---|---|---|---|---|---|---|---|---|---|
| A | A | | A | A | A | A | A | A | | A | A |
| D | D | D | D | D | | D | D | D | | D | D |
| E | E | E | E | E | | E | E | E | E | E | E |
| F | F | | F | F | F | F | | F | F | F | F |
| G | | G | | G | G | G | G | G | G | G | G |
| H | H | | H | H | | H | | H | H | H | H |
| I | I | | | I | I | | I | I | I | | I |
| K | K | | | K | K | K | K | K | K | K | K |
| L | L | | L | L | L | L | L | L | L | L | |
| | M | | M | M | M | M | M | M | M | M | M |
| N | N | N | | N | | N | N | N | N | N | N |
| P | P | P | | | P | P | P | | P | P | |
| Q | Q | | Q | Q | Q | Q | Q | Q | Q | Q | Q |
| R | R | | R | R | R | R | R | | R | R | R |
| S | S | S | S | S | S | S | S | S | S | S | S |
| T | T | | T | T | T | T | T | T | T | T | T |
| V | V | | | V | V | V | V | V | | V | V |
| | | | W | | W | W | | | W | | |
| Y | | | Y | Y | Y | | Y | | | Y | Y |

[0075] In some embodiments, the monomer domains of a library, multimer or polypeptide are typicaly about 40% identical to each other, usually about 50% identical, sometimes about 60% identical, and frequently at least 70% identical.

[0076] The invention also provides polynucleotides encoding the above-described polypeptides.

[0077] The present invention also provides multimers of immuno-domains having binding specificity for a target molecule, as well as methods for generating and screening libraries of such multimers for binding to a desired target molecule. More specifically, the present invention provides a method for identifying a multimer that binds to a target molecule, the method comprising, providing a library of immuno-domains; screening the library of immuno-domains for affinity to a first target molecule; identifying one or more (e.g., two or more) immuno-domains that bind to at least one target molecule; linking the identified monomer domain to form a library of multimers, each multimer comprising at least three immuno-domains (e.g., four or more, five or more, six or more, etc.); screening the library of multimers for the ability to bind to the first target molecule; and identifying a multimer that binds to the first target molecule. Libraries of multimers of at least two immuno-domains that are minibodies, single domain antibodies, Fabs, or combinations thereof are also employed in the practice of the present invention. Such libraries can be readily screened for multimers that bind to desired target molecules in accordance with the invention methods described herein.

[0078] The present invention further provides methods of identifying hetero-immuno multimers that binds to a target molecule. In some embodiments, the methods comprise, providing a library of immuno-domains; screening the library of immuno-domains for affinity to a first target molecule; providing a library of monomer domains; screening the library of monomer domains for affinity to a first target molecule; identifying at least one immuno-domain that binds to at least one target molecule; identifying at least one monomer domain that binds to at least one target molecule; linking the identified immuno-domain with the identified monomer domains to form a library of multimers, each multimer comprising at least two domains; screening the library of multimers for the ability to bind to the first target molecule; and identifying a multimer that binds to the first target molecule.

[0079] The present invention also provides methods for identifying an LDL-receptor class A monomer domain that binds to a target molecule. In some embodiments, the method comprises providing a library of LDL-receptor class A monomer domains; screening the library of LDL-receptor class A monomer domains for affinity to a target molecule; and identifying an LDL-receptor class A monomer domain that binds to the target molecule.

[0080] In some embodiments, the method comprises linking each member of a library of LDL-receptor class A monomers to the identified monomer domain to form a library of multimers; screening the library of multimers for affinity to the target molecule; and identifying a multimer that binds to the target. In some embodiments, the multimer binds to the target with greater affinity than the monomer. In some embodiments, the method further comprises expressing the library using a display format selected from the group consisting of a phage display, a ribosome display, a polysome display, or a cell surface display.

[0081] In some embodiments, the method further comprises a step of mutating at least one monomer domain, thereby providing a library comprising mutated LDL-receptor class A monomer domains. In some embodiments, the mutating step comprises directed evolution. In some embodiments, the mutating step comprises site-directed mutagenesis.

[0082] The present invention also provides method of producing a polypeptide comprising the multimer identified in a method comprising providing a library of LDL-receptor class A monomer domains; screening the library of LDL-receptor class A monomer domains for affinity to a target molecule; and identifying an LDL-receptor class A monomer domain that binds to the target molecule. In some embodiments, the multimer is produced by recombinant gene expression.

[0083] The present invention also provides methods for generating a library of chimeric LDL receptor A-domain monomers derived from human LDL receptor A-domains. In some embodiments, the methods comprise providing loop sequences corresponding to at least one loop from each of two different naturally occurring variants of a human LDL receptor A-domains, wherein the loop sequences are polynucleotide or polypeptide sequences; covalently combining loop sequences to generate a library of chimeric monomer domain sequences, each chimeric sequence encoding a chimeric LDL receptor A-domain monomer having at least two loops; expressing the library of chimeric LDL receptor A-domain monomers using a display format selected from the group consisting of phage display, ribosome display, polysome display, and cell surface display; screening the expressed library of chimeric LDL receptor A-domain monomers for binding to a target molecule; and identifying a chimeric LDL receptor A-domain monomer that binds to the target molecule.

[0084] In some embodiments, the methods further comprise linking the identified chimeric LDL receptor A-domain monomer domain to each member of the library of chimeric LDL receptor A-domain monomers to form a library of multimers; screening the library of multimers for the ability to bind to the first target molecule with an increased affinity; and identifying a multimer of chimeric LDL receptor A-domain monomers that binds to the first target molecule with an increased affinity.

[0085] The present invention also provides methods of making chimeric LDL receptor A-domain monomer identified in a method comprising providing loop sequences corresponding to at least one loop from each of two different naturally occurring variants of a human LDL receptor A-domains, wherein the loop sequences are polynucleotide or polypeptide sequences; covalently combining loop sequences to generate a library of chimeric monomer domain sequences, each chimeric sequence encoding a chimeric LDL receptor A-domain monomer having at least two loops; expressing the library of chimeric LDL receptor A-domain monomers using a display format selected from the group consisting of phage display, ribosome display, polysome display, and cell surface display; screening the expressed library of chimeric LDL receptor A-domain monomers for binding to a target molecule; and identifying a chimeric LDL receptor A-domain monomer that binds to the target molecule. In some embodiments, the chimeric LDL receptor A-domain monomer is produced by recombinant gene expression.

[0086] The present invention also provides non-naturally-occurring polypeptides comprising an LDL receptor class A domain monomer, wherein the monomer comprises the following sequence:

[0087] CₐX₃₋₁₅C_{b}X₃₋₁₅C_{c}X₆₋₇C_{d}(D,N)X₄CₑX₄₋₆DEX₂₋₈C_{f}

[0088] wherein C is cysteine, Xₙ₋ₘ represents between n and m number of independently selected amino acids, and (D,N) indicates that the position can be either D or N; and wherein Cₐ-C_{c}, C_{b}-Cₑ and C_{d}-C_{f} form disulfide bonds.

[0089] In some embodiments, the monomer domain is an LDL receptor class A domain monomer comprising the following sequence:

[0090] CₐX₆₋₇C_{b}X₄₋₅C_{c}X₆C_{d}X₅CₑX₈₋₁₀C_{f}

[0091] wherein X is defined as follows:

| | | | | |
|---|---|---|---|---|
| C | X(6,7) | C | X(4,5) | C |

| X1 | X2 | X3 | X4 | X5 | X6 | X1 | X2 | X3 | X4 |
|---|---|---|---|---|---|---|---|---|---|
| A | A | A | A | A | A | A | A | | A |
| | C | | | | | | | | C |
| D | D | D | D | | | D | D | D | D |
| E | E | E | E | | E | E | | E | E |
| F | | F | F | F | F | F | | | F |
| G | G | G | G | | | G | G | G | G |
| H | H | H | H | H | H | H | H | H | H |
| | I | | | I | I | | | | I |
| K | K | K | K | K | K | K | | K | K |
| L | L | | L | L | L | L | | L | L |
| M | M | | M | M | M | | | | M |
| N | N | N | N | | N | N | N | N | N |
| P | P | P | | | P | P | | | |
| Q | Q | Q | Q | Q | Q | Q | Q | Q | Q |
| R | R | R | R | R | R | R | R | R | R |
| S | S | S | S | S | S | S | S | S | S |
| T | T | T | T | T | T | T | T | T | T |
| V | V | V | | V | V | V | V | | V |
| | W | W | | W | | | | | |
| | Y | Y | Y | Y | | Y | Y | | |

| | | | | |
|---|---|---|---|---|
| C | X(6,7) | C | X(4,5) | C |

| X1 | X2 | X3 | X4 | X5 | X6 | X7 | X1 | X2 | X3 | X4 | X5 |
|---|---|---|---|---|---|---|---|---|---|---|---|
| A | A | | | | | A | A | | A | A | A |
| D | D | D | D | D | | | D | D | D | D | D |
| E | E | | E | E | | E | E | E | E | E | E |
| F | | F | F | | F | | | | | F | |
| G | G | G | G | G | | G | G | G | G | G | G |
| H | H | | H | | H | | H | | H | H | H |
| | | | | | | | | I | I | I | I |
| K | | K | K | K | | K | K | K | K | K | K |
| L | L | L | | L | L | L | L | L | | L | L |
| | | | M | | | M | | | | | M |
| N | N | N | N | N | | | N | N | N | N | N |
| P | P | P | | P | | | P | P | P | P | |
| | | Q | | Q | | | Q | Q | Q | Q | Q |
| R | R | R | R | R | | R | R | R | R | R | R |
| S | S | S | S | | | S | S | S | S | S | |
| T | T | T | T | | | T | T | T | T | T | T |
| | | V | V | | V | V | V | V | | V | V |
| | | | | | W | | W | | | W | |
| | | Y | | | | | | | Y | Y | |

| | | | | |
|---|---|---|---|---|
| C | X(6) | C | X(5) | C |

| X1 | X2 | X3 | X4 | X5 | X6 | X1 | X2 | X3 | X4 | X5 |
|---|---|---|---|---|---|---|---|---|---|---|
| A | A | A | A | A | A | | A | A | A | |
| | D | D | D | D | | D | D | D | D | D |
| | E | E | E | E | E | | E | E | E | E |
| F | F | F | F | F | F | | F | F | F | |
| | G | G | G | G | | | G | G | | |
| | H | H | H | | H | | H | H | H | H |
| I | | I | I | | I | | | I | I | |
| K | K | K | K | K | K | | K | K | K | |
| L | L | L | L | L | L | | L | L | L | |
| | M | M | M | M | M | | M | M | | |
| | N | N | N | N | | N | N | N | N | N |
| | P | P | P | | P | | | | P | |
| | Q | Q | Q | Q | Q | | Q | Q | Q | Q |
| | R | R | R | R | R | | R | R | R | |
| | S | S | S | S | | | S | S | S | S |
| T | T | T | T | T | T | | T | T | T | T |
| V | V | V | V | V | V | | V | V | V | |
| | W | | W | W | W | | W | W | W | |
| Y | Y | Y | Y | Y | Y | | Y | Y | Y | |

| | | |
|---|---|---|
| C | X(8,10) | C |

| X1 | X2 | X3 | X4 | X5 | X6 | X7 | X8 |
|---|---|---|---|---|---|---|---|
| A | | A | A | | | A | A |
| D | D | D | | D | | D | D |
| E | | E | E | | E | E | E |
| | | F | | | | F | F |
| G | G | G | G | | | G | G |
| H | H | H | | | | H | H |
| I | | | | | | I | I |
| K | | K | | | | K | K |
| L | | L | L | | | L | L |
| M | | M | M | | | M | M |
| | N | N | | | | N | N |
| P | | | | | | | P |
| Q | Q | Q | | | | Q | Q |
| R | | R | R | | | R | R |
| S | S | S | S | | | S | S |
| T | T | | T | | | T | |
| V | | | | | | V | |
| | | W | | | | W | |
| | Y | Y | | | | Y | |

| | | |
|---|---|---|
| C | X(8,10) | C |

| X1 | X2 | X3 | X4 | X5 | X6 | X7 | X8 | X9 |
|---|---|---|---|---|---|---|---|---|
| A | | A | | | | A | A | A |
| D | D | | | D | | | D | D |
| | | | | | E | E | E | E |
| F | | | | | | | | |
| G | | G | | | | G | G | |
| | | H | | | | H | | H |
| L | | | | | | L | | L |
| M | | | | | | M | | |
| | N | | | | | N | N | N |
| P | | | | | | P | P | |
| | | Q | | | | | Q | Q |
| | | R | | | | R | | |
| S | | | S | | | S | | S |
| T | | | T | | | | | |
| V | | | | | | | V | |
| | Y | | Y | | | | Y | |

| | | |
|---|---|---|
| C | X(8,10) | C |

| X1 | X2 | X3 | X4 | X5 | X6 | X7 | X8 | X9 | X10 |
|---|---|---|---|---|---|---|---|---|---|
| | | | A | | | A | A | A | A |
| | D | D | | D | | D | D | D | |
| E | | | E | | E | E | E | E | E |
| | | F | | | | | | | |
| G | | G | | | | G | | G | |
| | | H | | | | | H | H | H |
| | | | | | | | I | I | I |
| K | | K | | | | K | K | K | |
| L | | | L | | | L | L | L | L |
| | | | | | | M | M | | M |
| | N | N | | | | N | N | | N |
| P | | | | | | P | P | | P |
| Q | | Q | | | | | Q | Q | Q |
| R | | R | | | | | R | | R |
| S | S | S | S | | | S | S | S | |
| | | | T | | | T | | T | T |
| | | | | | | | | V | V |
| | | W | | | | W | | | |
| | | Y | | | | | | Y | Y |

[0092] In some embodiments, the polypeptide is 65 or fewer amino acids long. In some embodiments, the monomer is fused to a heterologous amino acid sequence. In some embodiments, the monomer binds to a target molecule. In some embodiments, the heterologous amino acid sequence is selected from an affinity peptide, a heterologous LDL receptor class A domain, a heterologous EGF domain, and a purification tag

[0093] The present invention also provides non-naturally-occurring polypeptides comprising an EGF domain monomer, wherein the EGF domain monomer comprises the following sequence:

[0094] CₐX₃₋₁₄C_{b}X₃₋₇C_{c}X₄₋₁₆C_{d}X₁₋₂CₑX₈₋₂₃C_{f}

[0095] wherein C is cysteine, Xₙ₋ₘ represents between n and m number of independently selected amino acids; and

[0096] wherein Cₐ-C_{c}, C_{b}-Cₑ and C_{d}-C_{f} form disulfide bonds.

[0097] In some embodiments, the monomer domain is an EGF domain monomer comprising the following sequence:

[0098] CₐX₄₋₆C_{b}X₃₋₅C_{c}X₈₋₉C_{d}X₁CₑX₈₋₁₂C_{f}

[0099] wherein X is defined as follows:

| | | | | |
|---|---|---|---|---|
| C | X(4,6) | C | X(3,5) | C |

| X1 | X2 | X3 | X4 | X1 | X2 | X3 |
|---|---|---|---|---|---|---|
| A | A | A | A | A | | A |
| D | D | D | | D | | D |
| E | E | E | E | E | | E |
| F | | | | | F | F |
| G | G | G | G | G | G | G |
| H | H | H | | H | H | H |
| I | | | | | | I |
| K | K | K | | K | | K |
| L | L | L | | | L | L |
| | M | M | M | | | |
| N | N | N | N | N | N | N |
| P | P | P | P | P | | |
| Q | | Q | Q | Q | Q | Q |
| R | R | R | R | | | R |
| S | S | S | S | S | S | S |
| T | T | T | T | T | T | T |
| V | | V | | V | | V |
| W | | W | | | | |
| | Y | | Y | | Y | Y |

| | | | | |
|---|---|---|---|---|
| C | X(4,6) | C | X(3,5) | C |

| X1 | X2 | X3 | X4 | X5 | X1 | X2 | X3 | X4 |
|---|---|---|---|---|---|---|---|---|
| A | A | A | A | A | A | A | A | A |
| D | D | | D | | D | D | | D |
| E | E | E | E | | E | E | | E |
| | F | F | F | F | F | F | | F |
| G | G | G | G | G | G | G | G | |
| | H | H | H | | H | H | | H |
| I | I | | I | I | I | | | I |
| K | K | | K | K | K | K | | K |
| L | L | L | L | L | L | L | | L |
| | M | | | M | M | | | M |
| | N | N | N | N | N | N | | N |
| | P | P | P | P | P | P | | |
| Q | Q | Q | | Q | Q | Q | | Q |
| R | R | R | R | R | R | R | | R |
| S | S | S | S | S | S | S | | S |
| T | T | T | T | T | T | T | T | T |
| V | V | | | V | V | | | V |
| | | W | | | | | | |
| | | Y | | Y | | Y | | |

| | | | | |
|---|---|---|---|---|
| C | X(4,6) | C | X(3,5) | C |

| X1 | X2 | X3 | X4 | X5 | X6 | X1 | X2 | X3 | X4 | X5 |
|---|---|---|---|---|---|---|---|---|---|---|
| A | A | A | A | A | A | A | A | A | A | A |
| | | | | | | C | | | | |
| D | D | D | D | D | D | D | D | D | | D |
| E | E | E | E | E | E | E | E | E | | E |
| F | F | F | F | F | | F | | F | F | F |
| G | G | G | G | G | G | G | G | G | G | |
| | H | H | H | H | | H | H | H | H | H |
| I | I | I | I | I | I | | I | | | I |
| K | K | K | K | K | K | K | K | K | | K |
| L | L | L | L | L | L | L | L | L | | L |
| M | M | M | M | | M | M | M | | | M |
| N | N | N | N | N | N | N | N | N | | N |
| P | P | P | P | P | P | P | P | | | |
| Q | Q | Q | Q | Q | Q | Q | Q | Q | Q | Q |
| R | R | R | R | R | R | R | R | R | | R |
| S | S | S | S | S | S | S | S | S | S | S |
| T | T | T | T | | T | | T | T | T | T |
| V | V | V | V | V | V | V | V | | V | V |
| | | W | | | | | | | | |
| Y | Y | | | Y | Y | Y | Y | Y | | |

| | | | | |
|---|---|---|---|---|
| C | X(8,9) | C | X(1) | C |

| X1 | X2 | X3 | X4 | X5 | X6 | X7 | X8 | X1 |
|---|---|---|---|---|---|---|---|---|
| A | A | A | A | A | A | A | A | A |
| | | C | | | | | | |
| D | D | D | D | D | D | | D | D |
| E | E | E | E | E | E | | E | E |
| F | | F | F | F | | F | F | F |
| G | | G | G | G | G | | | G |
| H | | H | H | H | H | H | H | H |
| I | | I | I | I | | I | I | I |
| K | K | K | K | K | K | | K | K |
| L | L | L | L | L | L | L | L | L |
| M | | M | M | | M | | M | M |
| N | N | N | N | N | N | | N | N |
| | P | P | P | P | | P | | P |
| Q | Q | Q | Q | Q | Q | | Q | Q |
| R | R | R | R | R | R | R | R | R |
| S | S | S | S | S | S | | S | S |
| T | T | T | T | T | T | T | T | T |
| V | V | V | V | V | V | V | V | V |
| W | | | W | W | W | | W | W |
| Y | | Y | Y | | Y | Y | Y | Y |

| | | | | |
|---|---|---|---|---|
| C | X(8,9) | C | X(1) | C |

| X1 | X2 | X3 | X4 | X5 | X6 | X7 | X8 | X9 |
|---|---|---|---|---|---|---|---|---|
| A | A | A | A | A | A | A | | A |
| D | D | D | D | D | D | D | | |
| | E | E | E | E | E | E | | E |
| F | F | F | | F | | | F | |
| | | G | G | G | G | G | | |
| H | H | H | | | | | H | H |
| I | | | | | | | I | |
| K | | | | K | | K | | K |
| L | L | L | | L | | L | | L |
| M | M | | | | M | M | | |
| N | N | N | N | N | N | | | |
| | P | | P | P | | | P | |
| Q | Q | | Q | Q | | Q | | Q |
| R | R | R | R | R | R | R | R | |
| S | S | S | S | S | S | S | | S |
| T | | T | T | T | T | T | | T |
| V | V | V | | | V | | V | V |
| | | | | | | | W | |
| Y | Y | Y | | | Y | | Y | Y |

| | | | | |
|---|---|---|---|---|
| C | X(8,9) | C | X(1) | C |

| | | | | | | | |
|---|---|---|---|---|---|---|---|
| X1 | X2 | X3 | X4 | X5 | X6 | X7 | X8 |

| | | |
|---|---|---|
| C | X(8/12) | C |

| X1 | X2 | X3 | X4 | X5 | X6 | X7 | X8 |
|---|---|---|---|---|---|---|---|
| A | A | A | | A | | A | A |
| D | D | | | D | D | D | D |
| E | E | E | | E | | E | E |
| F | F | | F | F | | F | F |
| | G | G | | G | G | | |
| H | H | H | H | H | | H | H |
| | | | I | I | | I | I |
| K | K | K | | K | | K | K |
| L | L | L | L | L | | L | L |
| M | | | M | M | | | M |
| N | N | N | | N | | N | N |
| P | P | P | | | | P | |
| Q | Q | | | Q | | Q | Q |
| R | R | R | R | R | | R | R |
| S | S | S | | S | S | S | S |
| T | T | T | T | T | | T | T |
| V | V | | | V | | V | |
| W | | | W | | | | |
| Y | Y | Y | Y | Y | | Y | Y |

| | | |
|---|---|---|
| C | X(8/12) | C |

| X1 | X2 | X3 | X4 | X5 | X6 | X7 | X8 | X9 | X10 | X11 | X12 |
|---|---|---|---|---|---|---|---|---|---|---|---|
| A | A | | A | A | A | A | A | A | | A | A |
| D | D | D | D | D | | D | D | D | | D | D |
| E | E | E | E | E | | E | E | E | E | E | E |
| F | F | | F | F | F | F | | F | F | F | F |
| G | | G | | G | G | G | G | G | G | G | G |
| H | H | | H | H | | H | | H | H | H | H |
| I | I | | | I | I | | I | I | I | | I |
| K | K | | | K | K | K | K | K | K | K | K |
| L | L | | L | L | L | L | L | L | L | L | |
| | M | | M | M | M | M | M | M | M | M | M |
| N | N | N | | N | | N | N | N | N | N | N |
| P | P | P | | | P | P | P | | P | P | |
| Q | Q | | Q | Q | Q | Q | Q | Q | Q | Q | Q |
| R | R | | R | R | R | R | R | | R | R | R |
| S | S | S | S | S | S | S | S | S | S | S | S |
| T | T | | T | T | T | T | T | T | T | T | T |
| V | V | | | V | V | V | V | V | | V | V |
| | | | W | | W | W | | | W | | |
| Y | | | Y | Y | Y | | Y | | | Y | Y |

[0100] In some embodiments, the EGF domain monomer is fused to a heterologous amino acid sequence. In some embodiments, the monomer binds to a target molecule. In some embodiments, the polypeptide is 45 or fewer amino acids long. In some embodiments, the heterologous amino acid sequence is selected from an affinity peptide (e.g., SKVILF), a heterologous LDL receptor class A domain, a heterologous EGF domain, a purification tag, an enzyme (e.g., horseradish peroxidase or alkaline phosphatase), and a reporter protein (e.g., green fluorescent protein or luciferase).

### DEFINITIONS

[0101] Unless otherwise indicated, the following definitions supplant those in the art.

[0102] The term “monomer domain” or “monomer” is used interchangeably herein refer to a discrete region found in a protein or polypeptide. A monomer domain forms a native three-dimensional structure in solution in the absence of flanking native amino acid sequences. Monomer domains of the invention will specifically bind to a target molecule. For example, a polypeptide that forms a three-dimensional structure that binds to a target molecule is a monomer domain. As used herein, the term “monomer domain” does not encompass the complementarity determining region (CDR) of an antibody.

[0103] The term “monomer domain variant” refers to a domain resulting from human-manipulation of a monomer domain sequence. Examples of man-manipulated changes include, e.g., random mutagenesis, site-specific mutagenesis, shuffling, directed evolution, oligo-directed forced crossover events, direct gene synthesis incoorperation of mutation, etc. The term “monomer domain variant” does not embrace a mutagenized complementarity determining region (CDR) of an antibody.

[0104] The term “loop” refers to that portion of a monomer domain that is typically exposed to the environment by the assembly of the scaffold structure of the monomer domain protein, and which is involved in target binding. The present invention provides three types of loops that are identified by specific features, such as, potential for disulfide bonding, bridging between secondary protein structures, and molecular dynamics (i.e., flexibility). The three types of loop sequences are a cysteine-defined loop sequence, a structure-defined loop sequence, and a B-factor-defined loop sequence.

[0105] As used herein, the term “cysteine-defined loop sequence” refers to a subsequence of a naturally occurring monomer domain-encoding sequence that is bound at each end by a cysteine residue that is conserved with respect to at least one other naturally occurring monomer domain of the same family. Cysteine-defined loop sequences are identified by multiple sequence alignment of the naturally occurring monomer domains, followed by sequence analysis to identify conserved cysteine residues. The sequence between each consecutive pair of conserved cysteine residues is a cysteine-defined loop sequence. The cysteine-defined loop sequence does not include the cysteine residues adjacent to each terminus. Monomer domains having cysteine-defined loop sequences include the LDL receptor A-domains, EGF-like domains, sushi domains, Fibronectin type 1 domains, and the like. Thus, for example, in the case of LDL receptor A-domains represented by the consensus sequence, CX₆CX₄CX₆CX₅CX₈C (see also FIG. 9), wherein X₆, X₄, X₅, and X₈ each represent a cysteine-defined loop sequence.

[0106] As used herein, the term “structure-defined loop sequence” refers to a subsequence of a monomer-domain encoding sequence that is bound at each end to subsequences that each form a secondary structure. Secondary structures for proteins with known three dimensional structures are identified in accordance with the algorithm STRIDE for assigning protein secondary structure as described in Frishman, D. and Argos, P. (1995) “Knowledge-based secondary structure assignment,” Proteins, 23(4):566-79 (see also //hgrmp.mrc.ac.uk/Registered/Option/stride.html at the World Wide Web). Secondary structures for proteins with unknown or uncharacterized three dimensional structures are identified in accordance with the algorithm described in Jones, D. T. (1999), “Protein secondary structure prediction based on position-specific scoring matrices,” J. Mol. Biol., 292:195-202 (see also McGuffin, L. J., Bryson, K., Jones, D. T. (2000) “The PSIPRED protein structure prediction server,” Bioinformatics, 16:404-405, and /bioinf.cs.ucl.ac.uk/psipred/ at the World Wide Web). Secondary structures include, for example, pleated sheets, helices, and the like. Examples of monomer domains having structure-defined loop sequences are the C2 domains, Ig domains, Factor 5/8 C domains, Fibronectin type 3 domains, and the like.

[0107] The term “B-factor-defined loop sequence” refers to a subsequence of at least three amino acid residues of a monomer-domain encoding sequence in which the B-factors for the alpha carbons in the B-factor-defined loop are among the 25% highest alpha carbon B factors in the entire monomer domain. Typically the average alpha-carbon B-factor for the subsequence is at least about 65. As used herein, the term “B-factor” (or “temperature factor” or “Debye-Waller factor”) is derived from X-ray scattering data. The B-factor is a factor that can be applied to the X-ray scattering term for each atom, or for groups of atoms, that describes the degree to which electron density is spread out B-factors employed in the practice of the present invention may be either isotropic or anisotropic. The term “average alpha-carbon B-factor” refers to:

$$( {\sum }_{i = 1}^{n} B \text{-} {factor}_{C α i} ) / n$$

[0108] where n corresponds to the number of residues in the loop, and is at least 3, and B-factor_{Cαi} is the B-factor for the alpha carbon of amino acid residue in of the loop.

[0109] The term “multimer” is used herein to indicate a polypeptide comprising at least two monomer domains and/or immuno-domains (e.g., at least two monomer domains, at least two immuno-domains, or at least one monomer domain and at least one immuno-domain). The separate monomer domains and/or immuno-domains in a multimer can be joined together by a linker. A multimer is also known as a combinatorial mosaic protein or a recombinant mosaic protein.

[0110] The term “family” and “family class” are used interchangably to indicate proteins that are grouped together based on similarities in their amino acid sequences. These similar sequences are generally conserved because they are important for the function of the protein and/or the maintenance of the three dimensional structure of the protein. Examples of such families include the LDL Receptor A-domain family, the EGF-like family, and the like.

[0111] The term “ligand,” also referred to herein as a “target molecule,” encompasses a wide variety of substances and molecules, which range from simple molecules to complex targets. Target molecules can be proteins, nucleic acids, lipids, carbohydrates or any other molecule capable of recognition by a polypeptide domain. For example, a target molecule can include a chemical compound (i.e., non-biological compound such as, e.g., an organic molecule, an inorganic molecule, or a molecule having both organic and inorganic atoms, but excluding polynucleotides and proteins), a mixture of chemical compounds, an array of spatially localized compounds, a biological macromolecule, a bacteriophage peptide display library, a polysome peptide display library, an extract made from a biological materials such as bacteria, plants, fungi, or animal (e.g., mammalian) cells or tissue, a protein, a toxin, a peptide hormone, a cell, a virus, or the like. Other target molecules include, e.g., a whole cell, a whole tissue, a mixture of related or unrelated proteins, a mixture of viruses or bacterial strains or the like. Target molecules can also be defined by inclusion in screening assays described herein or by enhancing or inhibiting a specific protein interaction (i.e., an agent that selectively inhibits a binding interaction between two predetermined polypeptides).

[0112] As used herein, the term “immuno-domains” refers to protein binding domains that contain at least one complementarity determining region (CDR) of an antibody. Immuno-domains can be naturally occurring immunological domains (i.e. isolated from nature) or can be non-naturally occurring immunological domains that have been altered by human-manipulation (e.g., via mutagenesis methods, such as, for example, random mutagenesis, site-specific mutagenesis, and the like, as well as by directed evolution methods, such as, for example, recursive error-prone PCR, recursive recombination, and the like.). Different types of immuno-domains that are suitable for use in the practice of the present invention include a minibody, a single-domain antibody, a single chain variable fragment (ScFv), and a Fab fragment.

[0113] The term “minibody” refers herein to a polypeptide that encodes only 2 complementarity determining regions (CDRs) of a naturally or non-naturally (e.g., mutagenized) occurring heavy chain variable domain or light chain variable domain, or combination thereof. An example of a minibody is described by Pessi et al., A designed metal-bindingprotein with a novel fold, (1993) Nature 362:367-369. A multimer of minibodies is schematically illustrated in FIG. 11A. The circles depict minibodies, and the solid lines depict the linker moieties joining the immuno-domains to each other.

[0114] As used herein, the term “single-domain antibody” refers to the heavy chain variable domain (“V_{H}”) of an antibody, i.e., a heavy chain variable domain without a light chain variable domain. Exemplary single-domain antibodies employed in the practice of the present invention include, for example, the Camelid heavy chain variable domain (about 118 to 136 amino acid residues) as described in Hamers-Casterman, C. et al., Naturally occurring antibodies devoid of light chains (1993) Nature 363:446-448, and Dumoulin, et al., Single-domain antibody fragments with high conformational stability (2002) Protein Science 11:500-515. A multimer of single-domain antibodies is depicted in FIG. 11B. The ellipses represent the single-domain antibodies, and the solid lines depict the linker moieties joining the single-domain antibodies to each other.

[0115] The terms “single chain variable fragment” or “ScFv” are used interchangeably herein to refer to antibody heavy and light chain variable domains that are joined by a peptide linker having at least 12 amino acid residues. Single chain variable fragments contemplated for use in the practice of the present invention include those described in Bird, et al., Single-chain antigen-binding proteins (1988) Science 242(4877):423-426 and Huston et al., Protein engineering of antibody binding sites: recovery of specific activity in an anti-digoxin single-chain Fv analogue produced in Escherichia coli (1988) Proc Natl Acad Sci USA 85(16):5879-83. A multimer of single chain variable fragments is illustrated in FIG. 11C. The dotted lines represent the peptide linker joining the heavy and light chain variable domains to each other. The solid lines depict the linker moieties joining the heavy chain variable domains to each other.

[0116] As used herein, the term “Fab fragment” refers to an immuno-domain that has two protein chains, one of which is a light chain consisting of two light chain domains (V_{L} variable domain and C_{L} constant domain) and a heavy chain consisting of two heavy domains (i.e., a V_{H} variable and a C_{H} constant domain). Fab fragments employed in the practice of the present invention include those that have an interchain disulfide bond at the C-terminus of each heavy and light component, as well as those that do not have such a C-terminal disulfide bond. Each fragment is about 47 kD. Fab fragments are described by Pluckthun and Skerra, Expression of functional antibody Fv and Fab fragments in Escherichia col (1989) Methods Enzymol 178:497-515. A multimer of Fab fragments is depicted in FIG. 11D. The white ellipses represent the heavy chain component of the Fab fragment, the filled ellipses represent the light chain component of the Fab.

[0117] The term “linker” is used herein to indicate a moiety or group of moieties that joins or connects two or more discrete separate monomer domains. The linker allows the discrete separate monomer domains to remain separate when joined together in a multimer. The linker moiety is typically a substantially linear moiety. Suitable linkers include polypeptides, polynucleic acids, peptide nucleic acids and the like. Suitable linkers also include optionally substituted alkylene moieties that have one or more oxygen atoms incorporated in the carbon backbone. Typically, the molecular weight of the linker is less than about 2000 daltons. More typically, the molecular weight of the linker is less than about 1500 daltons and usually is less than about 1000 daltons. The linker can be small enough to allow the discrete separate monomer domains to cooperate, e.g., where each of the discrete separate monomer domains in a multimer binds to the same target molecule via separate binding sites. Exemplary linkers include a polynucleotide encoding a polypeptide, or a polypeptide of amino acids or other non-naturally occurring moieties. The linker can be a portion of a native sequence, a variant thereof, or a synthetic sequence. Linkers can comprise, e.g., naturally occurring, non-naturally occurring amino acids, or a combination of both.

[0118] The term “separate” is used herein to indicate a property of a moiety that is independent and remains independent even when complexed with other moieties, including for example, other monomer domains. A monomer domain is a separate domain in a protein because it has an independent property that can be recognized and separated from the protein. For instance, the ligand binding ability of the A-domain in the LDLR is an independent property. Other examples of separate include the separate monomer domains in a multimer that remain separate independent domains even when complexed or joined together in the multimer by a linker. Another example of a separate property is the separate binding sites in a multimer for a ligand.

[0119] As used herein, “directed evolution” refers to a process by which polynucleotide variants are generated, expressed, and screened for an activity (e.g., a polypeptide with binding activity) in a recursive process. One or more candidates in the screen are selected and the process is then repeated using polynucleotides that encode the selected candidates to generate new variants. Directed evolution involves at least two rounds of variation generation and can include 3, 4, 5, 10, 20 or more rounds of variation generation and selection. Variation can be generated by any method known to those of skill in the art, including, e.g., by error-prone PCR, gene shuffling, chemical mutagenesis and the like.

[0120] The term “shuffling” is used herein to indicate recombination between non-identical sequences. In some embodiments, shuffling can include crossover via homologous recombination or via non-homologous recombination, such as via cre/lox and/or flp/frt systems. Shuffling can be carried out by employing a variety of different formats, including for example, in vitro and in vivo shuffling formats, in silico shuffling formats, shuffling formats that utilize either double-stranded or single-stranded templates, primer based shuffling formats, nucleic acid fragmentation-based shuffling formats, and oligonucleotide-mediated shuffling formats, all of which are based on recombination events between non-identical sequences and are described in more detail or referenced herein below, as well as other similar recombination-based formats. The term “random” as used herein refers to a polynucleotide sequence or an amino acid sequence composed of two or more amino acids and constructed by a stochastic or random process. The random polynucleotide sequence or amino acid sequence can include framework or scaffolding motifs, which can comprise invariant sequences.

[0121] The term “pseudorandom” as used herein refers to a set of sequences, polynucleotide or polypeptide, that have limited variability, so that the degree of residue variability at some positions is limited, but any pseudorandom position is allowed at least some degree of residue variation.

[0122] The terms “polypeptide,” “peptide,” and “protein” are used herein interchangeably to refer to an amino acid sequence of two or more amino acids.

[0123] ‘Conservative amino acid substitution” refers to the interchangeability of residues having similar side chains. For example, a group of amino acids having aliphatic side chains is glycine, alanine, valine, leucine, and isoleucine; a group of amino acids having aliphatic-hydroxyl side chains is serine and threonine; a group of amino acids having amide-containing side chains is asparagine and glutamine; a group of amino acids having aromatic side chains is phenylalanine, tyrosine, and tryptophan; a group of amino acids having basic side chains is lysine, arginine, and histidine; and a group of amino acids having sulfur-containing side chains is cysteine and methionine. Preferred conservative amino acids substitution groups are: valine-leucine-isoleucine, phenylalanine-tyrosine, lysine-arginine, alanine-valine, and asparagine-glutamine.

[0124] The phrase “nucleic acid sequence” refers to a single or double-stranded polymer of deoxyribonucleotide or ribonucleotide bases read from the 5′ to the 3′ end. It includes chromosomal DNA, self-replicating plasmids and DNA or RNA that performs a primarily structural role.

[0125] The term “encoding” refers to a polynucleotide sequence encoding one or more amino acids. The term does not require a start or stop codon. An amino acid sequence can be encoded in any one of six different reading frames provided by a polynucleotide sequence.

[0126] The term “promoter” refers to regions or sequence located upstream and/or downstream from the start of transcription that are involved in recognition and binding of RNA polymerase and other proteins to initiate transcription.

[0127] A “vector” refers to a polynucleotide, which when independent of the host chromosome, is capable of replication in a host organism. Examples of vectors include plasmids. Vectors typically have an origin of replication. Vectors can comprise, e.g., transcription and translation terminators, transcription and translation initiation sequences, and promoters useful for regulation of the expression of the particular nucleic acid.

[0128] The term “recombinant” when used with reference, e.g., to a cell, or nucleic acid, protein, or vector, indicates that the cell, nucleic acid, protein or vector, has been modified by the introduction of a heterologous nucleic acid or protein or the alteration of a native nucleic acid or protein, or that the cell is derived from a cell so modified. Thus, for example, recombinant cells express genes that are not found within the native (nonrecombinant) form of the cell or express native genes that are otherwise abnormally expressed, under-expressed or not expressed at all.

[0129] The phrase “specifically (or selectively) binds” to a polypeptide, when referring to a monomer or multimer, refers to a binding reaction that can be determinative of the presence of the polypeptide in a heterogeneous population of proteins and other biologics. Thus, under standard conditions or assays used in antibody binding assays, the specified monomer or multimer binds to a particular target molecule above background (e.g., 2×, 5×, 10× or more above background) and does not bind in a significant amount to other molecules present in the sample.

[0130] The terms “identical” or percent “identity,” in the context of two or more nucleic acids or polypeptide sequences, refer to two or more sequences or subsequences that are the same. “Substantially identical” refers to two or more nucleic acids or polypeptide sequences having a specified percentage of amino acid residues or nucleotides that are the same (i.e., 60% identity, optionally 65%, 70%, 75%, 80%, 85%, 90%, or 95% identity over a specified region, or, when not specified, over the entire sequence), when compared and aligned for maximum correspondence over a comparison window, or designated region as measured using one of the following sequence comparison algorithms or by manual alignment and visual inspection. Optionally, the identity or substantial identity exists over a region that is at least about 50 nucleotides in length, or more preferably over a region that is 100 to 500 or 1000 or more nucleotides or amino acids in length.

[0131] A polynucleotide or amino acid sequence is “heterologous to” a second sequence if the the two sequences are not linked in the same manner as found in naturally-occurring sequences. For example, a promoter operably linked to a heterologous coding sequence refers to a coding sequence which is different from any naturally-occurring allelic variants. The term “heterologous linker,” when used in reference to a multimer, indicates that the multimer comprises a linker and a monomer that are not found in the same relationship to each other in nature (e.g., they form a fusion protein).

### BRIEF DESCRIPTION OF THE DRAWINGS

[0132] FIG. 1 schematically illustrates the type, number and order of monomer domains found in members of the LDL-receptor family. These monomer domains include β-Propeller domains, EGF-like domains and LDL receptor class A-domains. The members shown include low-density lipoprotein receptor (LDLR), ApoE Receptor 2 (ApoER2), very-low-density lipoprotein receptor (VLDLR), LDLR-related protein 2 (LRP2) and LDLR-related proteinI (LRP1).

[0133] FIG. 2 schematically illustrates the alignment of partial amino acid sequence from a variety of the LDL-receptor class A-domains (SEQ ID NOS: 103, 100, 65, 117, 128, 21, 29, 39, 30, 77, 58, 50, and 14, respectively in order of appearance) that include two human LRP1 sequences, two human LRP2 sequences, two human LDLR sequences, two human LDVR sequences, one human LRP3 sequence, one human MAT sequence, a human CO6 sequence, and a human SORL sequence, to demonstrate the conserved cysteines.

[0134] FIG. 3, panel A schematically illustrates an example of an A-domain. Panel A schematically illustrates conserved amino acids in an A-domain of about 40 amino acids long. The conserved cysteine residues are indicated by C, and the negatively charged amino acids are indicated by a circle with a minus (“−”) sign. Circles with an “H” indicate hydrophobic residues. Panel B schematically illustrates two folded A-domains connected via a linker. Panel B also indicates two calcium binding sites, dark circles with Ca⁺², and three disulfide bonds within each folded A-domain for a total of 6 disulfide bonds.

[0135] FIG. 4 indicates some of the ligands recognized by the LDL-receptor family, which include inhibitors, proteases, protease complexes, vitamin-carrier complexes, proteins involved in lipoprotein metabolism, non-human ligands, antibiotics, viruses, and others.

[0136] FIG. 5 schematically illustrates a general scheme for identifying monomer domains that bind to a ligand, isolating the selected monomer domains, creating multimers of the selected monomer domains by joining the selected monomer domains in various combinations and screening the multimers to identify multimers comprising more than one monomer that binds to a ligand.

[0137] FIG. 6 is a schematic representation of another selection strategy (guided selection). A monomer domain with appropriate binding properties is identified from a library of monomer domains. The identified monomer domain is then linked to monomer domains from another library of monomer domains to form a library of multimers. The multimer library is screened to identify a pair of monomer domains that bind simultaneously to the target. This process can then be repeated until the optimal binding properties are obtained in the multimer.

[0138] FIG. 7 shows the multimerization process of monomer domains. The target-binding monomer hits are amplified from a vector. This mixture of target-binding monomer domains and/or immuno-domains is then cleaved and mixed with an optimal combination of linker and stopper oligonucleotides. The multimers that are generated are then cloned into a suitable vector for the second selection step for identification of target-binding multimers.

[0139] FIG. 8 depicts common amino acids in each position of the A domain. The percentages above the amino acid positions refer to the percentage of naturally-occurring A domains with the inter-cysteine spacing displayed. Potential amino acid residues in bold depicted under each amino acid position represent common residues at that position. The final six amino acids, depicted as lighter-colored circles, represent linker sequences. The two columns of italicized amino acid residues at positions 2 and 3 of the linker represent amino acid residues that do not occur at that position. Any other amino acid (e.g., A, D, E, G, H, I, K, L, N, P, Q, R, S, T, and V) may be included at these positions.

[0140] FIG. 9 displays the frequency of occurrence of amino acid residues in naturally-occurring A domains for A domains with the following spacing between cysteines: CX₆CX₄CX₆CX₅CX₈C (SEQ ID NO: 199).

[0141] FIG. 10 depicts an alignment of A domains (SEQ ID NO: 1-197). At the top and the bottom of the figure, small letters (a-q) indicate conserved residues. The predominant amino acids at these positions and the frequency with which they were observed in native A domains is illustrated at the bottom of the figure.

[0142] FIG. 11 depicts possible multimer conformations comprised of immuno-domains. FIG. 11A illustrates a multimer of minibodies. FIG. 11B illustrates a multimer of single-domain antibodies. FIG. 11C illustrates an immuno-domain multimer of scfvs. FIG. 11D illustrates a multimer of Fab fragments.

[0143] FIG. 12 depicts linkage of domains via partial linkers.

[0144] FIG. 13 illustrates exemplary multimer ring formations.

[0145] FIG. 14 illustrates various multimer conformations of heavy and light chains of Fvs.

[0146] FIG. 15 is a graphical representation of the regions of sequence identity between the sequences of two different selected clones and known human sequences from a database. The horizontal bars indicate areas of sequence identity between the sequence of the selected clone and the human sequence and the numbers indicate the exact amino acid numbers that define the region of identity. The vertical arrow depicts an acceptable crossover sequence.

[0147] FIG. 16 illustrates cell killing induced by CD20-specific A domain monomers.

[0148] FIG. 17 illustrates binding of A domain monomer-expressing phage to recombinant TPO-R abd TF1 cells.

[0149] FIG. 18 illustrates TF1 cell proliferation in response to TPO-R-specific A domain monomers and multimers.

[0150] FIG. 19 illustrates IgE-specific A domain monomer and multimer-expressing phage binding to (a) IgE directly immobilized on a plate, or (b) IgE immobilized on the plate by binding to an immobilized antibody to IgE's CE2 domain, or (c) IgE immobilized on the plate by binding to an immobilized antibody to IgE's CE3 domain, or (d) immobilized by binding to immobilized IgE receptor R1.

[0151] FIG. 20 illustrates ELISA binding data of selected A-domain monomers that bind to CD28.

[0152] FIG. 21 illustrates results from a competition ELISA experiment where soluble IL6 receptor and monomer Mb9 are competed against immobilized IL6.

[0153] FIG. 22 illustrates cell proliferation inhibition of by a IL6-specific monomer.

[0154] FIG. 23 illustrates the effect of an IL6-specific monomer on isolated peripheral blood lymphocytes (PBMC).

[0155] FIG. 24 illustrates screening a library of monomer domains against multiple ligands displayed on a cell.

[0156] FIG. 25 illustrates identification of monomers that were selected to bind to one of a plurality of ligands.

[0157] FIG. 26 illustrates an embodiment for identifying polynucleotides encoding ligands and monomer domains.

[0158] FIG. 27 illustrates monomer domain and multimer embodiments for increased avidity. While the figure illustrates specific gene products and binding affinities, it is appreciated that these are merely examples and that other binding targets can be used with the same or similar conformations.

[0159] FIG. 28 illustrates monomer domain and multimer embodiments for increased avidity. While the figure illustrates specific gene products and binding affinities, it is appreciated that these are merely examples and that other binding targets can be used with the same or similar conformations.

### DETAILED DESCRIPTION OF THE INVENTION

[0160] The invention provides an enhanced approach for selecting and optimizing properties of discrete monomer domains and/or immuno-domains to create multimers. In particular, this disclosure describes methods, compositions and kits for identifying discrete monomer domains and/or immuno-domains that bind to a desired ligand or mixture of ligands and creating multimers (also known as combinatorial mosaic proteins or recombinant mosaic proteins) that comprise two or more monomer domains and/or immuno-domains that are joined via a linker. The multimers can be screened to identify those that have an improved phenotype such as improved avidity or affinity or altered specificity for the ligand or the mixture of ligands, compared to the discrete monomer domain.

### 1. Discrete Monomer Domains

[0161] Monomer domains can be polypeptide chains of any size. In some embodiments, monomer domains have about 25 to about 500, about 30 to about 200, about 30 to about 100, about 90 to about 200, about 30 to about 250, about 30 to about 60, about 9 to about 150, about 100 to about 150, about 25 to about 50, or about 30 to about 150 amino acids. Similarly, a monomer domain of the present invention can comprise, e.g., from about 30 to about 200 amino acids; from about 25 to about 180 amino acids; from about 40 to about 150 amino acids; from about 50 to about 130 amino acids; or from about 75 to about 125 amino acids. Monomer domains and immuno-domains can typically maintain a stable conformation in solution. Sometimes, monomer domains and immuno-domains can fold independently into a stable conformation. In one embodiment, the stable conformation is stabilized by metal ions. The stable conformation can optionally contain disulfide bonds (e.g., at least one, two, or three or more disulfide bonds). The disulfide bonds can optionally be formed between two cysteine residues. In some embodiments, monomer domains, or monomer domain variants, are substantially identical to the sequences exemplified (e.g., A, C2) or otherwise referenced herein.

[0162] Publications describing monomer domains and mosaic proteins and references cited within include the following: Hegyi, H and Bork, P., On the classification and evolution ofprotein modules, (1997) J. Protein Chem., 16(5):545-551; Baron et al., Protein modules (1991) Trends Biochem. Sci., 16(1):13-7; Ponting et al., Evolution of domain families, (2000), Adv. Protein Chem., 54:185-244; Doolittle, The multiplicity of domains in proteins, (1995) Annu. Rev. Biochem 64:287-314; Doolitte and Bork, Evolutionarily mobile modules in proteins (1993) Scientific American, 269 (4):50-6; and Bork, Shuffled domains in extracellular proteins (1991), FEBS letters 286(1-2):47-54. Monomer domains of the present invention also include those domains found in Pfam database and the SMART database. See Schultz, et al., SMART: a web-based tool for the study of genetically mobile domains, (2000) Nucleic Acid Res. 28(1):231-34.

[0163] Monomer domains that are particularly suitable for use in the practice of the present invention are (1) β sandwich domains; (2) β-barrel domains; or (3) cysteine-rich domains comprising disulfide bonds. Cysteine-rich domains employed in the practice of the present invention typically do not form an α helix, a β sheet, or a β-barrel structure. Typically, the disulfide bonds promote folding of the domain into a three-dimensional structure. Usually, cysteine-rich domains have at least two disulfide bonds, more typically at least three disulfide bonds.

[0164] Domains can have any number of characteristics. For example, in some embodiments, the domains have low or no immunogenicity in an animal (e.g., a human). Domains can have a small size. In some embodiments, the domains are small enough to penetrate skin or other tissues. Domains can have a range of in vivo half-lives or stabilities.

[0165] Illustrative monomer domains suitable for use in the practice of the present invention include, e.g., an EGF-like domain, a Kringle-domain, a fibronectin type I domain, a fibronectin type II domain, a fibronectin type III domain, a PAN domain, a Gla domain, a SRCR domain, a Kunitz/Bovine pancreatic trypsin Inhibitor domain, a Kazal-type serine protease inhibitor domain, a Trefoil (P-type) domain, a von Willebrand factor type C domain, an Anaphylatoxin-like domain, a CUB domain, a thyroglobulin type I repeat, LDL-receptor class A domain, a Sushi domain, a Link domain, a Thrombospondin type I domain, an Immunoglobulin-like domain, a C-type lectin domain, a MAM domain, a von Willebrand factor type A domain, a Somatomedin B domain, a WAP-type four disulfide core domain, a F5/8 type C domain, a Hemopexin domain, an SH2 domain, an SH3 domain, a Laminin-type EGF-like domain, a C2 domain, and other such domains known to those of ordinary skill in the art, as well as derivatives and/or variants thereof. Insome embodiments, the monomer domain is not the C2 domain. FIG. 1 schematically diagrams various kinds of monomer domains found in molecules in the LDL-receptor family.

[0166] In some embodiments, suitable monomer domains (e.g. domains with the ability to fold independently or with some limited assistance) can be selected from the families of protein domains that contain β-sandwich or β-barrel three dimensional structures as defined by such computational sequence analysis tools as Simple Modular Architecture Research Tool (SMART), see Shultz et. al., SMART: a web-based tool for the study of genetically mobile domains, (2000) Nucleic Acids Research 28(1):231-234) or CATH (see Pearl et.al., Assigning genomic sequences to CATH, (2000) Nucleic Acids Research 28(1):277-282).

[0167] In another embodiment, monomer domains of the present invention include domains other than a fibronectin type III domain, an anticalin domain and a Ig-like domain from CTLA-4. Some aspects of these domains are described in WO01/64942 entitled “Protein scaffolds for antibody mimics and other binding proteins” by Lipovsek et al., published on Sep. 7, 2001, WO99/16873 entitled “Anticalins” by Beste et al., published Apr. 8, 1999 and WO 00/60070 entitled “A polypeptide structure for use as a scaffold” by Desmet, et al., published on Oct. 12, 2000.

[0168] As described supra, monomer domains are optionally cysteine rich. Suitable cysteine rich monomer domains include, e.g., the LDL receptor class A domain (“A-domain”) or the EGF-like domain. The monomer domains can also have a cluster of negatively charged residues. Optionally, the monomer domains contain a repeated sequence, such as YWTD (SEQ ID NO: 198) as found in the β-Propeller domain.

[0169] Other features of monomer domains include the ability to bind ligands (e.g., as in the LDL receptor class A domain, or the CUB domain (complement C1r/C1s, Uegf, and bone morphogenic protein-1 domain)), the ability to participate in endocytosis or internalization (e.g., as in the cytoplasmic tail of the LDL receptor or the cytoplasmic tail of Megalin), the ability to bind an ion (e.g., Ca²⁺ binding by the LDL receptor A-domain), and/or the ability to be involved in cell adhesion (e.g., as in the EGF-like domain). Other monomer domains that bind ions to maintain their secondary structure include, e.g., A domain, EGF domain, EF Hand (e.g., such as those found in present in calmodulin and troponin C), Cadherin domain, C-type lectin, C2 domain, Annexin, Gla-domain, Trombospondin type 3 domain, all of which bind calcium, and and zinc fingers (e.g., C2H2 type C3HC4 type (RING finger), Integrase Zinc binding domain, PHD finger, GATA zinc finger, FYVE zinc finger, B-box zinc finger), which bind zinc. Without intending to limit the invention, it is believed that ion-binding provides stability of secondary structure while providing sufficient flexibility to allow for numerous binding conformations depending on primary sequence.

[0170] Characteristics of a monomer domain include the ability to fold independently and the ability to form a stable structure. Thus, the structure of the monomer domain is often conserved, although the polynucleotide sequence encoding the monomer need not be conserved. For example, the A-domain structure is conserved among the members of the A-domain family, while the A-domain nucleic acid sequence is not. Thus, for example, a monomer domain is classified as an A-domain by its cysteine residues and its affinity for calcium, not necessarily by its nucleic acid sequence. See, FIG. 2.

[0171] Specifically, the A-domains (sometimes called “complement-type repeats”) contain about 30-50 or 30-65 amino acids. In some embodiments, the domains comprise about 35-45 amino acids and in some cases about 40 amino acids. Within the 30-50 amino acids, there are about 6 cysteine residues. Of the six cysteines, disulfide bonds typically are found between the following cysteines: C1 and C3, C2 and C5, C4 and C6. The A domain constitutes a ligand binding moiety. The cysteine residues of the domain are disulfide linked to form a compact, stable, functionally independent moiety. See, FIG. 3. Clusters of these repeats make up a ligand binding domain, and differential clustering can impart specificity with respect to the ligand binding.

[0172] Exemplary A domain sequences and consensus sequences are depicted in FIGS. 2, 3 and 8. FIG. 9 displays location and occurrence of residues in A domains with the following spacing between cysteines. In addition, FIG. 10 depicts a number of A domains and provides a listing of conserved amino acids. One typical consensus sequence useful to identify A domains is the following: C-[VILMA]-X₍₅₎-C-[DNH]-X₍₃₎-[DENQHT]-C-X_{(3,4)}-[STADE]-[DEH]-[DE]-X_{(1,5-C}) (SEQ ID NO: 200), where the residues in brackets indicate possible residues at one position. “X_{(#)}” indicates number of residues. These residues can be any amino acid residue. Parentheticals containing two numbers refers to the range of amino acids that can occupy that position (e.g., “[DE]-X_{(1,5)}-C” means that the amino acids DE are followed by 1, 2, 3, 4, or 5 residues, followed by C). This consensus sequence only represents the portion of the A domain beginning at the third cysteine. A second consensus is as follows: C-X₍₃₋₁₅₎-C-X₍₄₋₁₅₎-C-X₍₆₋₇₎-C-[N,D]-X₍₃₎-[D,E,N,Q,H,S,T]-C-X₍₄₋₆₎-D-E-X₍₂₋₈₎-C (SEQ ID NO: 201). The second consensus predicts amino acid residues spanning all six cysteine residues. In some embodiments, A domain variants comprise sequences substantially identical to any of the above-described sequences.

[0173] Additional exemplary A domains include the following sequence:

[0174] CₐX₃₋₁₅C_{b}X₃₋₁₅C_{c}X₆₋₇C_{d}(D,N)X₄CₑX₄₋₆DEX₂₋₈C_{f}

[0175] wherein C is cysteine, Xₙ₋ₘ represents between n and m number of independently selected amino acids, and (D,N) indicates that the position can be either D or N; and wherein Cₐ-C_{c}, C_{b}-Cₑ and C_{d}-C_{f} form disulfide bonds.

[0176] In some embodiments, the monomer domain is an LDL receptor class A domain monomer comprising the following sequence:

[0177] CₐX₆₋₇C_{b}X₄₋₅C_{c}X₆C_{d}X₅CₑX₈₋₁₀C_{f}

[0178] wherein X is defined as follows:

| | | | | |
|---|---|---|---|---|
| C | X(6,7) | C | X(4,5) | C |

| X1 | X2 | X3 | X4 | X5 | X6 | X1 | X2 | X3 | X4 |
|---|---|---|---|---|---|---|---|---|---|
| A | A | A | A | A | A | A | A | | A |
| | C | | | | | | | | C |
| D | D | D | D | | | D | D | D | D |
| E | E | E | E | | E | E | | E | E |
| F | | F | F | F | F | F | | | F |
| G | G | G | G | | | G | G | G | G |
| H | H | H | H | H | H | H | H | H | H |
| | I | | | I | I | | | | I |
| K | K | K | K | K | K | K | | K | K |
| L | L | | L | L | L | L | | L | L |
| M | M | | M | M | M | | | | M |
| N | N | N | N | | N | N | N | N | N |
| P | P | P | | | P | P | | | |
| Q | Q | Q | Q | Q | Q | Q | Q | Q | Q |
| R | R | R | R | R | R | R | R | R | R |
| S | S | S | S | S | S | S | S | S | S |
| T | T | T | T | T | T | T | T | T | T |
| V | V | V | | V | V | V | V | | V |
| | W | W | | W | | | | | |
| | Y | Y | Y | Y | | Y | Y | | |

| | | | | |
|---|---|---|---|---|
| C | X(6,7) | C | X(4,5) | C |

| X1 | X2 | X3 | X4 | X5 | X6 | X7 | X1 | X2 | X3 | X4 | X5 |
|---|---|---|---|---|---|---|---|---|---|---|---|
| A | A | | | | | A | A | | A | A | A |
| D | D | D | D | D | | | D | D | D | D | D |
| E | E | | E | E | | E | E | E | E | E | E |
| F | | F | F | | F | | | | | F | |
| G | G | G | G | G | | G | G | G | G | G | G |
| H | H | | H | | H | | H | | H | H | H |
| | | | | | | | | I | I | I | I |
| K | | K | K | K | | K | K | K | K | K | K |
| L | L | L | | L | L | L | L | L | | L | L |
| | | | M | | | M | | | | | M |
| N | N | N | N | N | | | N | N | N | N | N |
| P | P | P | | P | | | P | P | P | P | |
| | | Q | | Q | | | Q | Q | Q | Q | Q |
| R | R | R | R | R | | R | R | R | R | R | R |
| S | S | S | S | | | S | S | S | S | S | |
| T | T | T | T | | | T | T | T | T | T | T |
| | | V | V | | V | V | V | V | | V | V |
| | | | | | W | | W | | | W | |
| | | Y | | | | | | | Y | Y | |

| | | | | |
|---|---|---|---|---|
| C | X(6) | C | X(5) | C |

| X1 | X2 | X3 | X4 | X5 | X6 | X1 | X2 | X3 | X4 | X5 |
|---|---|---|---|---|---|---|---|---|---|---|
| A | A | A | A | A | A | | A | A | A | |
| | D | D | D | D | | D | D | D | D | D |
| | E | E | E | E | E | | E | E | E | E |
| F | F | F | F | F | F | | F | F | F | |
| | G | G | G | G | | | G | G | | |
| | H | H | H | | H | | H | H | H | H |
| I | | I | I | | I | | | I | I | |
| K | K | K | K | K | K | | K | K | K | |
| L | L | L | L | L | L | | L | L | L | |
| | M | M | M | M | M | | M | M | | |
| | N | N | N | N | | N | N | N | N | N |
| | P | P | P | | P | | | | P | |
| | Q | Q | Q | Q | Q | | Q | Q | Q | Q |
| | R | R | R | R | R | | R | R | R | |
| | S | S | S | S | | | S | S | S | S |
| T | T | T | T | T | T | | T | T | T | T |
| V | V | V | V | V | V | | V | V | V | |
| | W | | W | W | W | | W | W | W | |
| Y | Y | Y | Y | Y | Y | | Y | Y | Y | |

| | | |
|---|---|---|
| C | X(8,10) | C |

| X1 | X2 | X3 | X4 | X5 | X6 | X7 | X8 |
|---|---|---|---|---|---|---|---|
| A | | A | A | | | A | A |
| D | D | D | | D | | D | D |
| E | | E | E | | E | E | E |
| | | F | | | | F | F |
| G | G | G | G | | | G | G |
| H | H | H | | | | H | H |
| I | | | | | | I | I |
| K | | K | | | | K | K |
| L | | L | L | | | L | L |
| M | | M | M | | | M | M |
| | N | N | | | | N | N |
| P | | | | | | | P |
| Q | Q | Q | | | | Q | Q |
| R | | R | R | | | R | R |
| S | S | S | S | | | S | S |
| T | T | | T | | | T | |
| V | | | | | | V | |
| | | W | | | | W | |
| | Y | Y | | | | Y | |

| | | |
|---|---|---|
| C | X(8,10) | C |

| X1 | X2 | X3 | X4 | X5 | X6 | X7 | X8 | X9 |
|---|---|---|---|---|---|---|---|---|
| A | | A | | | | A | A | A |
| D | D | | | D | | | D | D |
| | | | | | E | E | E | E |
| F | | | | | | | | |
| G | | G | | | | G | G | |
| | | H | | | | H | | H |
| L | | | | | | L | | L |
| M | | | | | | M | | |
| | N | | | | | N | N | N |
| P | | | | | | P | P | |
| | | Q | | | | | Q | Q |
| | | R | | | | R | | |
| S | | | S | | | S | | S |
| T | | | T | | | | | |
| V | | | | | | | V | |
| | Y | | Y | | | | Y | |

| | | |
|---|---|---|
| C | X(8,10) | C |

| X1 | X2 | X3 | X4 | X5 | X6 | X7 | X8 | X9 | X10 |
|---|---|---|---|---|---|---|---|---|---|
| | | | A | | | A | A | A | A |
| | D | D | | D | | D | D | D | |
| E | | | E | | E | E | E | E | E |
| | | F | | | | | | | |
| G | | G | | | | G | | G | |
| | | H | | | | | H | H | H |
| | | | | | | | I | I | I |
| K | | K | | | | K | K | K | |
| L | | | L | | | L | L | L | L |
| | | | | | | M | M | | M |
| | N | N | | | | N | N | | N |
| P | | | | | | P | P | | P |
| Q | | Q | | | | | Q | Q | Q |
| R | | R | | | | | R | | R |
| S | S | S | S | | | S | S | S | |
| | | | T | | | T | | T | T |
| | | | | | | | | V | V |
| | | W | | | | W | | | |
| | | Y | | | | | | Y | Y |

[0179] The table above indicates alternative amino acid residues at each position of the LDL receptor class A monomer domain. For example, there can be either 6 or 7 amino acids between cysteine C1 and cysteine C2. The upper left box of the table indicates alternative amino acid residues at each position if there are 6 amino acids between C1 and C2. The bottom left box in the table indicates alternative amino acid residues if there are seven amino acids between C1 and C2. In all cases, the amino acid for one position (e.g., X1) is selected independently of the amino acids selected for remaining positions (e.g., X2, X3, etc.)

[0180] To date, at least 190 human A-domains are identified based on cDNA sequences. See, e.g., FIG. 10. Exemplary proteins containing A-domains include, e.g., complement components (e.g., C6, C7, C8, C9, and Factor I), serine proteases (e.g., enteropeptidase, matriptase, and corin), transmembrane proteins (e.g., ST7, LRP3, LRP5 and LRP6) and endocytic receptors (e.g., Sortilin-related receptor, LDL-receptor, VLDLR, LRP1, LRP2, and ApoER2). A domains and A domain variants can be readily employed in the practice of the present invention as monomer domains and variants thereof. Further description of A domains can be found in the following publications and references cited therein: Howell and Hertz, The LDL receptor gene family: signaling functions during development, (2001) Current Opinion in Neurobiology 11:74-81; Herz (2001), supra; Krieger, The “best” of cholesterols, the “worst” of cholesterols: A tale of two receptors, (1998) PNAS 95: 4077-4080; Goldstein and Brown, The Cholesterol Quartet, (2001) Science, 292: 1310-1312; and, Moestrup and Verroust, Megalin-and Cubilin-Mediated Endocytosis of Protein-Bound Vitamins, Lipids, and Hormones in Polarized Epithelia, (2001) Ann. Rev. Nutr. 21:407-28.

[0181] Another exemplary monomer domain suitable for use in the practice of the present invention is the C2 domain. C2 monomer domains are polypeptides containing a compact β-sandwich composed of two, four-stranded β-sheets, where loops at the “top” of the domain and loops at the “bottom” of the domain connect the eight β-strands. C2 monomer domains may be divided into two subclasses, namely C2 monomer domains with topology I (synaptotagmin-like topology) and topology II (cytosolic phospholipase A2-like topology), respectively. C2 monomer domains with topology I contains three loops at the “top” of the molecule (all of which are Ca²⁺ binding loops), whereas C2 monomer domains with topology II contain four loops at the “top” of the molecule (out of which only three are Ca²⁺ binding loops). The structure of C2 monomer domains have been reviewed by Rizo and Südhof, J. Biol. Chem. 273;15879-15882 (1998) and by Cho, J. Biol. Chem. 276;32407-32410 (2001). The terms “loop region 1”, “loop region 2” and “loop region 3” refer to the Ca²⁺ binding loop regions located at the “top” of the molecule. This nomenclature, which is used to distinguish the three Ca²⁺ binding loops located at the “top” of the molecule from the non-Ca²⁺ binding loops (mainly located at the “bottom” of the molecule) is widely used and recognized in the literature. See Rizo and Südhof, J. Biol. Chem. 273; 15879-15882 (1998). Loop regions 1, 2, and 3 represent target binding regions and thus can be varied to modulate binding specificity and affinity. The remaining portions of the C2 domain can be maintained without alteration if desired. Some exemplary C2 domains are substantially identical to the following sequence (SEQ ID NO: 202):

```
Tyr Ser His Lys Phe Thr Val Val Val Leu Arg Ala Thr Lys Val
1 5 10 15
Thr Lys Gly Ala Phe Gly Asp Met Leu Asp Thr Pro Asp Pro Tyr
                                20 25 30
Val Glu Leu Phe Ile Ser Thr Thr Pro Asp Ser Arg Lys Arg Thr
                                35 40 45
Arg His Phe Asn Asn Asp Ile Asn Pro Val Trp Asn Glu Thr Phe
                                50 55 60
Glu Phe Ile Leu Asp Pro Asn Gln Glu Asn Val Leu Glu Ile Thr
                                65 70 75
Leu Met Asp Ala Asn Tyr Val Met Asp Glu Thr Leu Gly Thr Ala
                                80 85 90
Thr Phe Thr Val Ser Ser Met Lys Val Gly Glu Lys Lys Glu Val
                                95 100 105
Pro Phe Ile Phe Asn Gln Val Thr Glu Met Val Leu Glu Met Ser
                                110 115 120
Leu Glu Val
                123.
```

[0182] Residues 1-16, 29-48, 54-77 and 86-123 constitute positions located outside loop regions 1, 2 and 3 and residues 17-28, 49-53 and 78-85 constitute the loop regions 1, 2 and 3, respectively.

[0183] Other examples of monomer domains can be found in the protein Cubilin, which contains EGF-type repeats and CUB domains. The CUB domains are involved in ligand binding, e.g., some ligands include intrinsic factor (IF)-vitamin B12, receptor associated protein (RAP), Apo A-I, Transferrin, Albumin, Ig light chains and calcium. See, Moestrup and Verroust, supra.

[0184] Megalin also contains multiple monomer domains. Specifically, megalin possesses LDL-receptor type A-domain, EGF-type repeat, a transmembrane segment and a cytoplasmic tail. Megalin binds a diverse set of ligands, e.g., ApoB, ApoE, ApoJ, clusterin, ApopH/Beta2-glycoprotein-I, PTH, Transthyretin, Thyroglobulin, Insulin, Aminoglycosides, Polymyxin B, Aprotinin, Trichosanthin, PAI-1, PAI-1-urokinase, PAI-1-tPA, Pro-urokinase, Lipoprotein lipase, alpha-Amylase, Albumin, RAP, Ig light chains, calcium, C1q, Lactoferrin, beta2-microglobulin, EGF, Prolactin, Lysozyme, Cytochrome c, PAP-1, Odorant-binding protein, seminal vesicle secretory protein II. See, Moestrup & Verroust, supra.

[0185] Exemplary EGF monomer domains include the sequence:

[0186] CₐX₃₋₁₄C_{b}X₃₋₇C_{c}X₄₋₁₆C_{d}X₁₋₂CₑX₈₋₂₃C_{f}

[0187] wherein C is cysteine, Xₙ₋ₘ represents between n and m number of independently selected amino acids; and

[0188] wherein Cₐ-C_{c}, C_{b}-Cₑ and C_{d}-C_{f} form disulfide bonds.

[0189] In some embodiments, the monomer domain is an EGF domain monomer comprising the following sequence:

[0190] CₐX₄₋₆C_{b}X₃₋₅C_{c}X₈₋₉C_{d}X₁CₑX₈₋₁₂C_{f}

[0191] wherein X is defined as follows:

| | | | | |
|---|---|---|---|---|
| C | X(4,6) | C | X(3,5) | C |

| X1 | X2 | X3 | X4 | X1 | X2 | X3 |
|---|---|---|---|---|---|---|
| A | A | A | A | A | | A |
| D | D | D | | D | | D |
| E | E | E | E | E | | E |
| F | | | | | F | F |
| G | G | G | G | G | G | G |
| H | H | H | | H | H | H |
| I | | | | | | I |
| K | K | K | | K | | K |
| L | L | L | | | L | L |
| | M | M | M | | | |
| N | N | N | N | N | N | N |
| P | P | P | P | P | | |
| Q | | Q | Q | Q | Q | Q |
| R | R | R | R | | | R |
| S | S | S | S | S | S | S |
| T | T | T | T | T | T | T |
| V | | V | | V | | V |
| W | | W | | | | |
| | Y | | Y | | Y | Y |

| | | | | |
|---|---|---|---|---|
| C | X(4,6) | C | X(3,5) | C |

| X1 | X2 | X3 | X4 | X5 | X1 | X2 | X3 | X4 |
|---|---|---|---|---|---|---|---|---|
| A | A | A | A | A | A | A | A | A |
| D | D | | D | | D | D | | D |
| E | E | E | E | | E | E | | E |
| | F | F | F | F | F | F | | F |
| G | G | G | G | G | G | G | G | |
| | H | H | H | | H | H | | H |
| I | I | | I | I | I | | | I |
| K | K | | K | K | K | K | | K |
| L | L | L | L | L | L | L | | L |
| | M | | | M | M | | | M |
| | N | N | N | N | N | N | | N |
| | P | P | P | P | P | P | | |
| Q | Q | Q | | Q | Q | Q | | Q |
| R | R | R | R | R | R | R | | R |
| S | S | S | S | S | S | S | | S |
| T | T | T | T | T | T | T | T | T |
| V | V | | | V | V | | | V |
| | | W | | | | | | |
| | | Y | | Y | | Y | | |

| | | | | |
|---|---|---|---|---|
| C | X(4,6) | C | X(3,5) | C |

| X1 | X2 | X3 | X4 | X5 | X6 | X1 | X2 | X3 | X4 | X5 |
|---|---|---|---|---|---|---|---|---|---|---|
| A | A | A | A | A | A | A | A | A | A | A |
| | | | | | | C | | | | |
| D | D | D | D | D | D | D | D | D | | D |
| E | E | E | E | E | E | E | E | E | | E |
| F | F | F | F | F | | F | | F | F | F |
| G | G | G | G | G | G | G | G | G | G | |
| | H | H | H | H | | H | H | H | H | H |
| I | I | I | I | I | I | | I | | | I |
| K | K | K | K | K | K | K | K | K | | K |
| L | L | L | L | L | L | L | L | L | | L |
| M | M | M | M | | M | M | M | | | M |
| N | N | N | N | N | N | N | N | N | | N |
| P | P | P | P | P | P | P | P | | | |
| Q | Q | Q | Q | Q | Q | Q | Q | Q | Q | Q |
| R | R | R | R | R | R | R | R | R | | R |
| S | S | S | S | S | S | S | S | S | S | S |
| T | T | T | T | | T | | T | T | T | T |
| V | V | V | V | V | V | V | V | | V | V |
| | | W | | | | | | | | |
| Y | Y | | | Y | Y | Y | Y | Y | | |

| | | | | |
|---|---|---|---|---|
| C | X(8,9) | C | X(1) | C |

| X1 | X2 | X3 | X4 | X5 | X6 | X7 | X8 | X1 |
|---|---|---|---|---|---|---|---|---|
| A | A | A | A | A | A | A | A | A |
| | | C | | | | | | |
| D | D | D | D | D | D | | D | D |
| E | E | E | E | E | E | | E | E |
| F | | F | F | F | | F | F | F |
| G | | G | G | G | G | | | G |
| H | | H | H | H | H | H | H | H |
| I | | I | I | I | | I | I | I |
| K | K | K | K | K | K | | K | K |
| L | L | L | L | L | L | L | L | L |
| M | | M | M | | M | | M | M |
| N | N | N | N | N | N | | N | N |
| | P | P | P | P | | P | | P |
| Q | Q | Q | Q | Q | Q | | Q | Q |
| R | R | R | R | R | R | R | R | R |
| S | S | S | S | S | S | | S | S |
| T | T | T | T | T | T | T | T | T |
| V | V | V | V | V | V | V | V | V |
| W | | | W | W | W | | W | W |
| Y | | Y | Y | | Y | Y | Y | Y |

| | | | | |
|---|---|---|---|---|
| C | X(8,9) | C | X(1) | C |

| X1 | X2 | X3 | X4 | X5 | X6 | X7 | X8 | X9 |
|---|---|---|---|---|---|---|---|---|
| A | A | A | A | A | A | A | | A |
| D | D | D | D | D | D | D | | |
| | E | E | E | E | E | E | | E |
| F | F | F | | F | | | F | |
| | | G | G | G | G | G | | |
| H | H | H | | | | | H | H |
| I | | | | | | | I | |
| K | | | | K | | K | | K |
| L | L | L | | L | | L | | L |
| M | M | | | | M | M | | |
| N | N | N | N | N | N | | | |
| | P | | P | P | | | P | |
| Q | Q | | Q | Q | | Q | | Q |
| R | R | R | R | R | R | R | R | |
| S | S | S | S | S | S | S | | S |
| T | | T | T | T | T | T | | T |
| V | V | V | | | V | | V | V |
| | | | | | | | W | |
| Y | Y | Y | | | Y | | Y | Y |

| | | | | |
|---|---|---|---|---|
| C | X(8,9) | C | X(1) | C |

| | | | | | | | |
|---|---|---|---|---|---|---|---|
| X1 | X2 | X3 | X4 | X5 | X6 | X7 | X8 |

| | | |
|---|---|---|
| C | X(8/12) | C |

| X1 | X2 | X3 | X4 | X5 | X6 | X7 | X8 |
|---|---|---|---|---|---|---|---|
| A | A | A | | A | | A | A |
| D | D | | | D | D | D | D |
| E | E | E | | E | | E | E |
| F | F | | F | F | | F | F |
| | G | G | | G | G | | |
| H | H | H | H | H | | H | H |
| | | | I | I | | I | I |
| K | K | K | | K | | K | K |
| L | L | L | L | L | | L | L |
| M | | | M | M | | | M |
| N | N | N | | N | | N | N |
| P | P | P | | | | P | |
| Q | Q | | | Q | | Q | Q |
| R | R | R | R | R | | R | R |
| S | S | S | | S | S | S | S |
| T | T | T | T | T | | T | T |
| V | V | | | V | | V | |
| W | | | W | | | | |
| Y | Y | Y | Y | Y | | Y | Y |

| | | |
|---|---|---|
| C | X(8/12) | C |

| X1 | X2 | X3 | X4 | X5 | X6 | X7 | X8 | X9 | X10 | X11 | X12 |
|---|---|---|---|---|---|---|---|---|---|---|---|
| A | A | | A | A | A | A | A | A | | A | A |
| D | D | D | D | D | | D | D | D | | D | D |
| E | E | E | E | E | | E | E | E | E | E | E |
| F | F | | F | F | F | F | | F | F | F | F |
| G | | G | | G | G | G | G | G | G | G | G |
| H | H | | H | H | | H | | H | H | H | H |
| I | I | | | I | I | | I | I | I | | I |
| K | K | | | K | K | K | K | K | K | K | K |
| L | L | | L | L | L | L | L | L | L | L | |
| | M | | M | M | M | M | M | M | M | M | M |
| N | N | N | | N | | N | N | N | N | N | N |
| P | P | P | | | P | P | P | | P | P | |
| Q | Q | | Q | Q | Q | Q | Q | Q | Q | Q | Q |
| R | R | | R | R | R | R | R | | R | R | R |
| S | S | S | S | S | S | S | S | S | S | S | S |
| T | T | | T | T | T | T | T | T | T | T | T |
| V | V | | | V | V | V | V | V | | V | V |
| | | | W | | W | W | | | W | | |
| Y | | | Y | Y | Y | | Y | | | Y | Y |

[0192] EGF monomer domains are sometimes between 25-45 amino acids and typically 30-39 amino acids.

[0193] Descriptions of some exemplary monomer domains can be found in the following publications and the references cited therein: Yamazaki et al., Elements of Neural Adhesion Molecules and a Yeast Vacuolar Protein Sorting Receptor are Present in a Novel Mammalian Low Density Lip oprotein Receptor Family Member, (1996) Journal of Biological Chemistry 271(40) 24761-24768; Nakayama et al., Identification of High-Molecular-Weight Proteins with Multiple EGF-like Motifs by Motif-Trap Screening, (1998) Genomics 51:27-34; Liu et al, Genomic Organization of New Candidate Tumor Suppressor Gene, LRP1B, (2000) Genomics 69:271-274; Liu et al., The Putative Tumor Suppressor LRP1B, a Novel Member of the Low Density Lipoprotein (LDL) Receptor Family, Exhibits Both Overlapping and Distinct Properties with the LDL Receptor-related Protein, (2001) Journal of Biological Chemistry 276(31):28889-28896; Ishii et al, cDNA of a New Low-Density Lipoprotein Receptor-Related Protein and Mapping of its Gene (LRP3) to Chromosome Bands 19q12-q13.2, (1998) Genomics 51:132-135; Orlando et al, Identification of the second cluster of ligand-binding repeats in megalin as a site for receptor-ligand interactions, (1997) PNAS USA 94:2368-2373; Jeon and Shipley, Vesicle-reconstituted Low Density Lipoprotein Receptor, (2000) Journal of Biological Chemistry 275(39):30458-30464; Simmons et al., Human Low Density Lipoprotein Receptor Fragment, (1997) Journal of Biological Chemistry 272(41):25531-25536; Fass et al., Molecular Basis of familial hypercholesterolaemia from structure of LDL receptor module, (1997) Nature 388:691-93; Daly et al., Three-dimensional structure of a cysteine-rich repeatfrom the low-density lipoprotein receptor, (1995) PNAS USA 92:6334-6338; North and Blacklow, Structural Independence of Ligand-Binding Modules Five and Six of the LDL Receptor, (1999) Biochemistry 38:3926-3935; North and Blacklow, Solution Structure of the Sixth LDL-A module of the LDL Receptor, (2000) Biochemistry 39:25640-2571; North and Blacklow, Evidence that Familial Hypercholesterolemia Mutations of the LDL Receptor Cause Limited Local Misfolding in an LDL-A Module Pair, (2000) Biochemistry 39:13127-13135; Beglova et al., Backbone Dynamics of a Module Pair from the Ligand-Binding Domain of the LDL Receptor, (2001) Biochemistry 40:2808-2815; Bieri et al., Folding, Calcium binding, and Structural Characterization of a Concatemer of the First and Second Ligand-Binding Modules of the Low-Density Lipoprotein Receptor, (1998) Biochemistry 37:10994-11002; Jeon et al., Implications for familial hypercholesterolemia from the structure of the LDL receptor YWTD-EGF domain pair, (2001) Nature Structural Biology 8(6):499-504; Kurniawan et al., NMR structure of a concatemer of the first and second ligand-binding modules of the human low-density lipoprotein receptor, (2000) Protein Science 9:1282-1293; Esser et al., Mutational Analysis of the Ligand Binding Domain of the Low Density Lipoprotein Receptor, (1988) Journal of Biological Chemistry 263(26): 13282-13290; Russell et al., Different Combinations of Cysteine-rich Repeats Mediate Binding of Low Density Lipoprotein Receptor to Two Different Proteins, (1989) Journal of Biological Chemistry 264(36):21682-21688; Davis et al., Acid-dependent ligand dissociation and recycling of LDL receptor mediated by growth factor homology region, (1987) Nature 326:760-765; Rong et al., Conversion of a human low-density lipoprotein receptor ligand-binding repeat to a virus receptor: Identification of residues important for ligand specificity, (1998) PNAS USA 95:8467-8472; Agnello et al., Hepatitis C virus and other Flaviviridae viruses enter cells via low density lipoprotein receptor; (1999) PNAS 96(22):12766-12771; Esser and Russell, Transport-deficient Mutations in the Low Density lipoprotein receptor, (1988) Journal of Biological Chemistry 263(26):13276-13281; Davis et al., The Low Density Lipoprotein Receptor, (1987) Journal of Biological Chemistry 262(9):4075-4082; and, Peacock et al., Human Low Density Lipoprotein Receptor Expressed in Xenopus Oocytes, (1988) Journal of Biological Chemistry 263(16):7838-7845.

[0194] Other publications that describe the VLDLR, ApoER2 and LRP1 proteins and their monomer domains include the following as well as the references cited therein: Savonen et al., The Carboxyl-terminal Domain of Receptor-associated Protein Facilitates Proper Folding and Trafficking of the Very Low Density Lipoprotein Receptor by Interaction with the Three Amino-terminal Ligand-binding Repeats of the Receptor, (1999) Journal of Biological Chemistry 274(36):25877-25882; Hewat et al., The cellular receptor to human rhinovirus 2 binds around the 5-fold axis and not in the canyon: a structural view, (2000) EMBO Journal 19(23):6317-6325; Okun et al., VLDL Receptor Fragments of Different Lengths Bind to Human Rhinovirus HRV2 with Different Stoichiometry, (2001) Journal of Biological Chemistry 276(2):1057-1062; Rettenberger et al., Ligand Binding Properties of the Very Low Density Lipoprotein Receptor, (1999) Journal of Biological Chemistry 274(13):8973-8980; Mikhailenko et al., Functional Domains of the very low density lipoprotein receptor: molecular analysis of ligand binding and acid-dependent ligand dissociation mechanisms, (1999) Journal of Cell Science 112:3269-3281; Brandes et al., Alternative Splicing in the Ligand Binding Domain of Mouse ApoE Receptor-2 Produces Receptor Variants Binding Reelin but not alpa2-macroglobulin, (2001) Journal of Biological Chemistry 276(25):22160-22169; Kim et al., Exon/Intron Organization, Chromosome Localization, Alternative Splicing, and Transcription Units of the Human Apolipoprotein E Receptor 2 Gene, (1997) Journal of Biological Chemistry 272(13):8498-8504; Obermoeller-McCormick et al., Dissection of receptor folding and ligand-binding property with functional minireceptors of LDL receptor-related protein, (2001) Journal of Cell Science 114(5):899-908; Horn et al., Molecular Analysis of Ligand Binding of the Second Cluster of Complement-type Repeats of the Low Density Lipoprotein Receptor-related Protein, (1997) Journal of Biological Chemistry 272(21):13608-13613; Neels et al., The Second and Fourth Cluster of Class A Cysteine-rich Repeats of the Low Density Lipoprotein Receptor-related Protein Share Ligand-binding Properties, (1999) Journal of Biological Chemistry 274(44):31305-31311; Obermoeller et al., Differential Functions of the Triplicated Repeats Suggest Two Independent Roles for the Receptor-Associated Protein as a Molecular Chaperone, (1997) Journal of Biological Chemistry 272(16):10761-10768; Andersen et al., Identification of the Minimal Functional Unit in the Low Density Lipoprotein Receptor-related Protein for Binding the Receptor-associated Protein (RAP), (2000) Journal of Biological Chemistry 275(28):21017-21024; Andersen et al., Specific Binding of alpha-Macroglobulin to Complement-Type Repeat CR4 of the Low-Density Lipoprotein Receptor-Related Protein, (2000) Biochemistry 39:10627-10633; Vash et al., Three Complement-Type Repeats of the Low-Density Lipoprotein Receptor-Related Protein Define a Common Binding Site for RAP, PAI-1, and Lactoferrin, (1998) Blood 92(9):3277-3285; Dolmer et al., NMR Solution Structure of Complement-like Repeat CR3 from the Low Density Lipoprotein Receptor-related Protein, (2000) Journal of Biological Chemistry 275(5):3264-3269; Huang et al., NMR Solution Structure of Complement-like Repeat CR8 from the Low Density Lipoprotein Receptor-related Protein, (1999) Journal of Biological Chemistry 274(20):14130-14136; and Liu et al., Uptake of HIV-1 Tat protein mediated by low-density lipoprotein receptor-related protein disrupts the neuronal metabolic balance of the receptor ligands, (2000) Nature Medicine 6(12):1380-1387.

[0195] Other references regarding monomer domains also include the following publications and references cited therein: FitzGerald et al, Pseudomonas Exotoxin-mediated Selection Yields Cells with Altered Expression of Low-Density Lipoprotein Receptor-related Protein, (1995) Journal of Cell Biology, 129: 1533-41; Willnow and Herz, Genetic deficiency in low density lipoprotein receptor-related protein confers cellular resistance to Pseudomonas exotoxin A, (1994) Journal of Cell Science, 107:719-726; Trommsdorf et al., Interaction of Cytosolic Adaptor Proteins with Neuronal Apolipoprotein E Receptors and the Amyloid Precursor Protein, (1998) Journal of Biological Chemistry, 273(5): 33556-33560; Stockinger et al., The Low Density Lipoprotein Receptor Gene Family, (1998) Journal of Biological Chemistry, 273(48): 32213-32221; Obermoeller et al., Ca+2 and Receptor-associated Protein are independently required for proper folding and disulfide bond formation of the low density lipoprotein receptor-related protein, (1998) Journal of Biological Chemistry, 273(35):22374-22381; Sato et al., 39-kDa receptor-associated protein (RAP) facilitates secretion and ligand binding of extracellular region of very-low-density-lipoprotein receptor: implications for a distinct pathway from low-density-lipoprotein receptor, (1999) Biochem. J., 341:377-383; Avromoglu et al, Functional Expression of the Chicken Low Density Lipoprotein Receptor-related Protein in a mutant Chinese Hamster Ovary Cell Line Restores Toxicity of Pseudomonas Exotoxin A and Degradation of alpha2-Macroglobulin, (1998) Journal of Biological Chemistry, 273(11) 6057-6065; Kingsley and Krieger, Receptor-mediated endocytosis of low density lipoprotein: Somatic cell mutants define multiple genes requiredfor expression of surface-receptor activity, (1984) PNAS USA, 81:5454-5458; Li et al, Differential Functions of Members of the Low Density Lipoprotein Receptor Family Suggests by their distinct endocystosis rates, (2001) Journal of Biological Chemistry 276(21):18000-18006; and, Springer, An Extracellular beta-Propeller Module Predicted in Lipoprotein and Scavenger Receptors, Tyrosine Kinases, Epidermal Growth Factor Precursor, and Extracellular Matrix Components, (1998) J. Mol. Biol. 283:837-862.

[0196] Polynucleotides (also referred to as nucleic acids) encoding the monomer domains are typically employed to make monomer domains via expression. Nucleic acids that encode monomer domains can be derived from a variety of different sources. Libraries of monomer domains can be prepared by expressing a plurality of different nucleic acids encoding naturally occurring monomer domains, altered monomer domains (i.e., monomer domain variants), or a combinations thereof.

[0197] The invention provides methods of identifying monomer domains that bind to a selected or desired ligand or mixture of ligands. In some embodiments, monomer domains and/or immuno-domains are identified or selected for a desired property (e.g., binding affinity) and then the monomer domains and/or immuno-domains are formed into multimers. See, e.g., FIG. 5. For those embodiments, any method resulting in selection of domains with a desired property (e.g., a specific binding property) can be used. For example, the methods can comprise providing a plurality of different nucleic acids, each nucleic acid encoding a monomer domain; translating the plurality of different nucleic acids, thereby providing a plurality of different monomer domains; screening the plurality of different monomer domains for binding of the desired ligand or a mixture of ligands; and, identifying members of the plurality of different monomer domains that bind the desired ligand or mixture of ligands.

[0198] As mentioned above, monomer domains can be naturally-occurring or altered (non-natural variants). The term “naturally occurring” is used herein to indicate that an object can be found in nature. For example, natural monomer domains can include human monomer domains or optionally, domains derived from different species or sources, e.g., mammals, primates, rodents, fish, birds, reptiles, plants, etc. The natural occurring monomer domains can be obtained by a number of methods, e.g., by PCR amplification of genomic DNA or cDNA.

[0199] Monomer domains of the present invention can be naturally-occurring domains or non-naturally occurring variants. Libraries of monomer domains employed in the practice of the present invention may contain naturally-occurring monomer domain, non-naturally occurring monomer domain variants, or a combination thereof.

[0200] Monomer domain variants can include ancestral domains, chimeric domains, randomized domains, mutated domains, and the like. For example, ancestral domains can be based on phylogenetic analysis. Chimeric domains are domains in which one or more regions are replaced by corresponding regions from other domains of the same family. For example, chimeric domains can be constructed by combining loop sequences from multiple related domains of the same family to form novel domains with potentially lowered immunogenicity. Those of skill in the art will recognized the immunologic benefit of constructing modified binding domain monomers by combining loop regions from various related domains of the same family rather than creating random amino acid sequences. For example, by constructing variant domains by combining loop sequences or even multiple loop sequences that occur naturally in human LDL receptor class A-domains, the resulting domains may contain novel binding properties but may not contain any immunogenic protein sequences because all of the exposed loops are of human origin. The combining of loop amino acid sequences in endogenous context can be applied to all of the monomer constructs of the invention. Thus the present invention provides a method for generating a library of chimeric monomer domains derived from human proteins, the method comprising: providing loop sequences corresponding to at least one loop from each of at least two different naturally occurring variants of a human protein, wherein the loop sequences are polynucleotide or polypeptide sequences; and covalently combining loop sequences to generate a library of at least two different chimeric sequences, wherein each chimeric sequence encodes a chimeric monomer domain having at least two loops. Typically, the chimeric domain has at least four loops, and usually at least six loops. As described above, the present invention provides three types of loops that are identified by specific features, such as, potential for disulfide bonding, bridging between secondary protein structures, and molecular dynamics (i.e., flexibility). The three types of loop sequences are a cysteine-defined loop sequence, a structure-defined loop sequence, and a B-factor-defined loop sequence.

[0201] Randomized domains are domains in which one or more regions are randomized. The randomization can be based on full randomization, or optionally, partial randomization based on natural distribution of sequence diversity.

[0202] The non-natural monomer domains or altered monomer domains can be produced by a number of methods. Any method of mutagenesis, such as site-directed mutagenesis and random mutagenesis (e.g., chemical mutagenesis) can be used to produce variants. In some embodiments, error-prone PCR is employed to create variants. Additional methods include aligning a plurality of naturally occurring monomer domains by aligning conserved amino acids in the plurality of naturally occurring monomer domains; and, designing the non-naturally occurring monomer domain by maintaining the conserved amino acids and inserting, deleting or altering amino acids around the conserved amino acids to generate the non-naturally occurring monomer domain. In one embodiment, the conserved amino acids comprise cysteines. In another embodiment, the inserting step uses random amino acids, or optionally, the inserting step uses portions of the naturally occurring monomer domains. The portions could ideally encode loops from domains from the same family. Amino acids are inserted or exchanged using synthetic oligonucleotides, or by shuffling, or by restriction enzyme based recombination. Human chimeric domains of the present invention are useful for therapeutic applications where minimal immunogenicity is desired. The present invention provides methods for generating libraries of human chimeric domains. Human chimeric monomer domain libraries can be constructed by combining loop sequences from different variants of a human monomer domain, as described above. The loop sequences that are combined may be sequence-defined loops, structure-defined loops, B-factor-defined loops, or a combination of any two or more thereof.

[0203] Alternatively, a human chimeric domain library can be generated by modifying naturally occurring human monomer domains at the amino acid level, as compared to the loop level. To minimize the potential for immunogenicity, only those residues that naturally occur in protein sequences from the same family of human monomer domains are utilized to create the chimeric sequences. This can be achieved by providing a sequence alignment of at least two human monomer domains from the same family of monomer domains, identifying amino acid residues in corresponding positions in the human monomer domain sequences that differ between the human monomer domains, generating two or more human chimeric monomer domains, wherein each human chimeric monomer domain sequence consists of amino acid residues that correspond in type and position to residues from two or more human monomer domains from the same family of monomer domains. Libraries of human chimeric monomer domains can be employed to identify human chimeric monomer domains that bind to a target of interest by: screening the library of human chimeric monomer domains for binding to a target molecule, and identifying a human chimeric monomer domain that binds to the target molecule. Suitable naturally occurring human monomer domain sequences employed in the initial sequence alignment step include those corresponding to any of the naturally occurring monomer domains described herein.

[0204] Human chimeric domain libraries of the present invention (whether generated by varying loops or single amino acid residues) can be prepared by methods known to those having ordinary skill in the art. Methods particularly suitable for generating these libraries are split-pool format and trinucleotide synthesis format as described in WO01/23401.

[0205] In addition to the invention methods for generating human chimeric domain libraries, the present invention also provides a method for screening a protein for potential immunogenicity by:

[0206] providing a candidate protein sequence;

[0207] comparing the candidate protein sequence to a database of human protein sequences;

[0208] identifying portions of the candidate protein sequence that correspond to portions of human protein sequences from the database; and

[0209] determining the extent of correspondence between the candidate protein sequence and the human protein sequences from the database.

[0210] In general, the greater the extent of correspondence between the candidate protein sequence and one or more of the human protein sequences from the database, the lower the potential for immunogenicity is predicted as compared to a candidate protein having little correspondence with any of the human protein sequences from the database. A database of human protein sequences that is suitable for use in the practice of the invention method for screening candidate proteins can be found at ncbi.nlm.nih.gov/blast/Blast.cgi at the World Wide Web (in addition, the following web site can be used to search short, nearly exact matches: cbi.nlm.nih.gov/blast/Blast.cgi?CMD=Web&LAYOUT=Two windows&AUTO_FORMAT=Semiauto&ALIGNMENTS=50&ALIGNMENT_VIEW=Pairwise&CLIENT=web&DATABASE=nr&DESCRIPTIONS=100&ENTREZ_QUERY=(none)&EXPECT=1000&FORMAT_OBJECT=Alignment&FORMAT_TYPE=HTML&NCBI_GI=on&PAGE=Nucleotides&PROGRAM=blastn&SERVICE=plain&SET_DEFAULTS.x=29&SET_DEFAULTS.y=6&SHOW_OVERVIEW=on&WORD_SIZE=7&END_OF_HTTPGET=Yes&SHOW_LINKOUT=yes at the World Wide Web). The method is particularly useful in determining whether a crossover sequence in a chimeric protein, such as, for example, a chimeric monomer domain, is likely to cause an immunogenic event. If the crossover sequence corresponds to a portion of a sequence found in the database of human protein sequences, it is believed that the crossover sequence is less likely to cause an immunogenic event. An example of the comparison step is depicted in FIG. 15, which shows a comparison of two candidate protein sequences to human sequences from a database. The horizontal lines indicate where the human protein sequences from the database are identical to the candidate protein sequence.

[0211] Human chimeric domain libraries prepared in accordance to the methods of the present invention can be screened for potential immunogenicity, in addition to binding affinity. Furthermore, information pertaining to portions of human protein sequences from the database can be used to design a protein library of human-like chimeric proteins. Such library can be generated by using information pertaining to “crossover sequences” that exist in naturally occurring human proteins. The term “crossover sequence” refers herein to a sequence that is found in its entirety in at least one naturally occurring human protein, in which portions of the sequence are found in two or more naturally occurring proteins. Thus, recombination of the latter two or more naturally occurring proteins would generate a chimeric protein in which the chimeric portion of the sequence actually corresponds to a sequence found in another naturally occurring protein. The crossover sequence contains a chimeric junction of two consecutive amino acid residue positions in which the first amino acid position is occupied by an amino acid residue identical in type and position found in a first and second naturally occurring human protein sequence, but not a third naturally occurring human protein sequence. The second amino acid position is occupied by an amino acid residue identical in type and position found in a second and third naturally occurring human protein sequence, but not the first naturally occurring human protein sequence. In other words, the “second” naturally occurring human protein sequence corresponds to the naturally occurring human protein in which the crossover sequence appears in its entirety, as described above.

[0212] In accordance with the present invention, a library of human-like chimeric proteins is generated by: identifying human protein sequences from a database that correspond to proteins from the same family of proteins; aligning the human protein sequences from the same family of proteins to a reference protein sequence; identifying a set of subsequences derived from different human protein sequences of the same family, wherein each subsequence shares a region of identity with at least one other subsequence derived from a different naturally occurring human protein sequence; identifying a chimeric junction from a first, a second, and a third subsequence, wherein each subsequence is derived from a different naturally occurring human protein sequence, and wherein the chimeric junction comprises two consecutive amino acid residue positions in which the first amino acid position is occupied by an amino acid residue common to the first and second naturally occurring human protein sequence, but not the third naturally occurring human protein sequence, and the second amino acid position is occupied by an amino acid residue common to the second and third naturally occurring human protein sequence, and generating human-like chimeric protein molecules each corresponding in sequence to two or more subsequences from the set of subsequences, and each comprising one of more of the identified chimeric junctions.

[0213] Thus, for example, if the first naturally occurring human protein sequence is, A-B-C, and the second is, B-C-D-E, and the third is, D-E-F, then the chimeric junction is C-D. Alternatively, if the first naturally occurring human protein sequence is D-E-F-G, and the second is B-C-D-E-F, and the third is A-B-C-D, then the chimeric junction is D-E. Human-like chimeric protein molecules can be generated in a variety of ways. For example, oligonucleotides comprising sequences encoding the chimeric junctions can be recombined with oligonucleotides corresponding in sequence to two or more subsequences from the above-described set of subsequences to generate a human-like chimeric protein, and libraries thereof. The reference sequence used to align the naturally occurring human proteins is a sequence from the same family of naturally occurring human proteins, or a chimera or other variant of proteins in the family.

[0214] Nucleic acids encoding fragments of naturally-occurring monomer domains and/or immuno-domains can also be mixed and/or recombined (e.g., by using chemically or enzymatically-produced fragments) to generate fill-length, modified monomer domains and/or immuno-domains. The fragments and the monomer domain can also be recombined by manipulating nucleic acids encoding domains or fragments thereof. For example, ligating a nucleic acid construct encoding fragments of the monomer domain can be used to generate an altered monomer domain.

[0215] Altered monomer domains can also be generated by providing a collection of synthetic oligonucleotides (e.g., overlapping oligonucleotides) encoding conserved, random, pseudorandom, or a defined sequence of peptide sequences that are then inserted by ligation into a predetermined site in a polynucleotide encoding a monomer domain. Similarly, the sequence diversity of one or more monomer domains can be expanded by mutating the monomer domain(s) with site-directed mutagenesis, random mutation, pseudorandom mutation, defined kernal mutation, codon-based mutation, and the like. The resultant nucleic acid molecules can be propagated in a host for cloning and amplification. In some embodiments, the nucleic acids are shuffled.

[0216] The present invention also provides a method for recombining a plurality of nucleic acids encoding monomer domains and screening the resulting library for monomer domains that bind to the desired ligand or mixture of ligands or the like. Selected monomer domain nucleic acids can also be back-crossed by shuffling with polynucleotide sequences encoding neutral sequences (i.e., having insubstantial functional effect on binding), such as for example, by back-crossing with a wild-type or naturally-occurring sequence substantially identical to a selected sequence to produce native-like functional monomer domains. Generally, during back-crossing, subsequent selection is applied to retain the property, e.g., binding to the ligand.

[0217] In some embodiments, the monomer library is prepared by shuffling. In such a case, monomer domains are isolated and shuffled to combinatorially recombine the nucleic acid sequences that encode the monomer domains (recombination can occur between or within monomer domains, or both). The first step involves identifying a monomer domain having the desired property, e.g., affinity for a certain ligand. While maintaining the conserved amino acids during the recombination, the nucleic acid sequences encoding the monomer domains can be recombined, or recombined and joined into multimers.

[0218] Selection of monomer domains and/or immuno-domains from a library of domains can be accomplished by a variety of procedures. For example, one method of identifying monomer domains and/or immuno-domains which have a desired property involves translating a plurality of nucleic acids, where each nucleic acid encodes a monomer domain and/or immuno-domain, screening the polypeptides encoded by the plurality of nucleic acids, and identifying those monomer domains and/or immuno-domains that, e.g., bind to a desired ligand or mixture of ligands, thereby producing a selected monomer domain and/or immuno-domain. The monomer domains and/or immuno-domains expressed by each of the nucleic acids can be tested for their ability to bind to the ligand by methods known in the art (i.e. panning, affinity chromatography, FACS analysis).

[0219] As mentioned above, selection of monomer domains and/or immuno-domains can be based on binding to a ligand such as a target protein or other target molecule (e.g., lipid, carbohydrate, nucleic acid and the like). Other molecules can optionally be included in the methods along with the target, e.g., ions such as Ca⁺². The ligand can be a known ligand, e.g., a ligand known to bind one of the plurality of monomer domains, or e.g., the desired ligand can be an unknown monomer domain ligand. See, e.g., FIG. 4, which illustrates some of the ligands that bind to the A-domain. Other selections of monomer domains and/or immuno-domains can be based, e.g., on inhibiting or enhancing a specific function of a target protein or an activity. Target protein activity can include, e.g., endocytosis or internalization, induction of second messenger system, up-regulation or down-regulation of a gene, binding to an extracellular matrix, release of a molecule(s), or a change in conformation. In this case, the ligand does not need to be known. The selection can also include using high-throughput assays.

[0220] When a monomer domain and/or immuno-domain is selected based on its ability to bind to a ligand, the selection basis can include selection based on a slow dissociation rate, which is usually predictive of high affinity. The valency of the ligand can also be varied to control the average binding affinity of selected monomer domains and/or immuno-domains. The ligand can be bound to a surface or substrate at varying densities, such as by including a competitor compound, by dilution, or by other method known to those in the art. High density (valency) of predetermined ligand can be used to enrich for monomer domains that have relatively low affinity, whereas a low density (valency) can preferentially enrich for higher affinity monomer domains.

[0221] A variety of reporting display vectors or systems can be used to express nucleic acids encoding the monomer domains immuno-domains and/or multimers of the present invention and to test for a desired activity. For example, a phage display system is a system in which monomer domains are expressed as fusion proteins on the phage surface (Pharmacia, Milwaukee Wis.). Phage display can involve the presentation of a polypeptide sequence encoding monomer domains and/or immuno-domains on the surface of a filamentous bacteriophage, typically as a fusion with a bacteriophage coat protein.

[0222] Generally in these methods, each phage particle or cell serves as an individual library member displaying a single species of displayed polypeptide in addition to the natural phage or cell protein sequences. The plurality of nucleic acids is cloned into the phage DNA at a site which results in the transcription of a fusion protein, a portion of which is encoded by the plurality of the nucleic acids. The phage containing a nucleic acid molecule undergoes replication and transcription in the cell. The leader sequence of the fusion protein directs the transport of the fusion protein to the tip of the phage particle. Thus, the fusion protein that is partially encoded by the nucleic acid is displayed on the phage particle for detection and selection by the methods described above and below. For example, the phage library can be incubated with a predetermined (desired) ligand, so that phage particles which present a fusion protein sequence that binds to the ligand can be differentially partitioned from those that do not present polypeptide sequences that bind to the predetermined ligand. For example, the separation can be provided by immobilizing the predetermined ligand. The phage particles (i.e., library members) which are bound to the immobilized ligand are then recovered and replicated to amplify the selected phage subpopulation for a subsequent round of affinity enrichment and phage replication. After several rounds of affinity enrichment and phage replication, the phage library members that are thus selected are isolated and the nucleotide sequence encoding the displayed polypeptide sequence is determined, thereby identifying the sequence(s) of polypeptides that bind to the predetermined ligand. Such methods are further described in PCT patent publication Nos. 91/17271, 91/18980, and 91/19818 and 93/08278.

[0223] Examples of other display systems include ribosome displays, a nucleotide-linked display (see, e.g., U.S. Pat. Nos. 6,281,344; 6,194,550, 6,207,446, 6,214,553, and 6,258,558), polysome display, cell surface displays and the like. The cell surface displays include a variety of cells, e.g., E. coli, yeast and/or mammalian cells. When a cell is used as a display, the nucleic acids, e.g., obtained by PCR amplification followed by digestion, are introduced into the cell and translated. Optionally, polypeptides encoding the monomer domains or the multimers of the present invention can be introduced, e.g., by injection, into the cell.

[0224] The invention also includes compositions that are produced by methods of the the present invention. For example, the present invention includes monomer domains selected or identified from a library and/or libraries comprising monomer domains produced by the methods of the present invention.

[0225] The present invention also provides libraries of monomer domains, immuno-domains and libraries of nucleic acids that encode monomer domains and/or immuno-domains. The libraries can include, e.g., about 100, 250, 500 or more nucleic acids encoding monomer domains and/or immuno-domains, or the library can include, e.g., about 100, 250, 500 or more polypeptides that encode monomer domains and/or immuno-domains. Libraries can include monomer domains containing the same cysteine frame, e.g., A-domains or EGF-like domains.

[0226] In some embodiments, variants are generated by recombining two or more different sequences from the same family of monomer domains and/or immuno-domains (e.g., the LDL receptor class A domain). Alternatively, two or more different monomer domains and/or immuno-domains from different families can be combined to form a multimer. In some embodiments, the multimers are formed from monomers or monomer variants of at least one of the following family classes: an EGF-like domain, a Kringle-domain, a fibronectin type I domain, a fibronectin type II domain, a fibronectin type III domain, a PAN domain, a Gla domain, a SRCR domain, a Kunitz/Bovine pancreatic trypsin Inhibitor domain, a Kazal-type serine protease inhibitor domain, a Trefoil (P-type) domain, a von Willebrand factor type C domain, an Anaphylatoxin-like domain, a CUB domain, a thyroglobulin type I repeat, LDL-receptor class A domain, a Sushi domain, a Link domain, a Thrombospondin type I domain, an Immunoglobulin-like domain, a C-type lectin domain, a MAM domain, a von Willebrand factor type A domain, a Somatomedin B domain, a WAP-type four disulfide core domain, a F5/8 type C domain, a Hemopexin domain, an SH2 domain, an SH3 domain, a Laminin-type EGF-like domain, a C2 domain and derivatives thereof. In another embodiment, the monomer domain and the different monomer domain can include one or more domains found in the Pfam database and/or the SMART database. Libraries produced by the methods above, one or more cell(s) comprising one or more members of the library, and one or more displays comprising one or more members of the library are also included in the present invention.

[0227] Optionally, a data set of nucleic acid character strings encoding monomer domains can be generated e.g., by mixing a first character string encoding a monomer domain, with one or more character string encoding a different monomer domain, thereby producing a data set of nucleic acids character strings encoding monomer domains, including those described herein. In another embodiment, the monomer domain and the different monomer domain can include one or more domains found in the Pfam database and/or the SMART database. The methods can further comprise inserting the first character string encoding the monomer domain and the one or more second character string encoding the different monomer domain in a computer and generating a multimer character string(s) or library(s), thereof in the computer.

[0228] The libraries can be screened for a desired property such as binding of a desired ligand or mixture of ligands. For example, members of the library of monomer domains can be displayed and prescreened for binding to a known or unknown ligand or a mixture of ligands. The monomer domain sequences can then be mutagenized (e.g., recombined, chemically altered, etc.) or otherwise altered and the new monomer domains can be screened again for binding to the ligand or the mixture of ligands with an improved affinity. The selected monomer domains can be combined or joined to form multimers, which can then be screened for an improved affinity or avidity or altered specificity for the ligand or the mixture of ligands. Altered specificity can mean that the specificity is broadened, e.g., binding of multiple related viruses, or optionally, altered specificity can mean that the specificity is narrowed, e.g., binding within a specific region of a ligand. Those of skill in the art will recognize that there are a number of methods available to calculate avidity. See, e.g., Mammen et al., Angew Chem Int. Ed. 37:2754-2794 (1998); Muller et al., Anal. Biochem. 261:149-158 (1998).

[0229] Those of skill in the art will recognize that the steps of generating variation and screening for a desired property can be repeated (i.e., performed recursively) to optimize results. For example, in a phage display library or other like format, a first screening of a library can be performed at relatively lower stringency, thereby selected as many particles associated with a target molecule as possible. The selected particles can then be isolated and the polynucleotides encoding the monomer or multimer can be isolated from the particles. Additional variations can then be generated from these sequences and subsequently screened at higher affinity. FIG. 7 illustrates a generic cycle of selection and generation of variation.

[0230] Compositions of nucleic acids and polypeptides are included in the present invention. For example, the present invention provides a plurality of different nucleic acids wherein each nucleic acid encodes at least one monomer domain or immuno-domain. In some embodiments, at least one monomer domain is selected from the group consisting of: an EGF-like domain, a Kringle-domain, a fibronectin type I domain, a fibronectin type II domain, a fibronectin type III domain, a PAN domain, a Gla domain, a SRCR domain, a Kunitz/Bovine pancreatic trypsin Inhibitor domain, a Kazal-type serine protease inhibitor domain, a Trefoil (P-type) domain, a von Willebrand factor type C domain, an Anaphylatoxin-like domain, a CUB domain, a thyroglobulin type I repeat, LDL-receptor class A domain, a Sushi domain, a Link domain, a Thrombospondin type I domain, an Immunoglobulin-like domain, a C-type lectin domain, a MAM domain, a von Willebrand factor type A domain, a Somatomedin B domain, a WAP-type four disulfide core domain, a F5/8 type C domain, a Hemopexin domain, an SH2 domain, an SH3 domain, a Laminin-type EGF-like domain, a C2 domain and variants of one or more thereof. Suitable monomer domains also include those listed in the Pfam database and/or the SMART database.

[0231] The present invention also provides recombinant nucleic acids encoding one or more polypeptides comprising a plurality of monomer domains and/or immuno-domains, which monomer domains are altered in order or sequence as compared to a naturally occuring polypeptide. For example, the naturally occuring polypeptide can be selected from the group consisting of: an EGF-like domain, a Kringle-domain, a fibronectin type I domain, a fibronectin type II domain, a fibronectin type III domain, a PAN domain, a Gla domain, a SRCR domain, a Kunitz/Bovine pancreatic trypsin Inhibitor domain, a Kazal-type serine protease inhibitor domain, a Trefoil (P-type) domain, a von Willebrand factor type C domain, an Anaphylatoxin-like domain, a CUB domain, a thyroglobulin type I repeat, LDL-receptor class A domain, a Sushi domain, a Link domain, a Thrombospondin type I domain, an Immunoglobulin-like domain, a C-type lectin domain, a MAM domain, a von Willebrand factor type A domain, a Somatomedin B domain, a WAP-type four disulfide core domain, a F5/8 type C domain, a Hemopexin domain, an SH2 domain, an SH3 domain, a Laminin-type EGF-like domain, a C2 domain and variants of one or more thereof. In another embodiment, the naturally occuring polypeptide encodes a monomer domain found in the Pfam database and/or the SMART database.

[0232] All the compositions of the present invention, including the compositions produced by the methods of the present invention, e.g., monomer domains and/or immuno-domains, as well as multimers and libraries thereof can be optionally bound to a matrix of an affinity material. Examples of affinity material include beads, a column, a solid support, a microarray, other pools of reagent-supports, and the like.

### 2. Multimers (also Called Recombinant Mosaic Proteins or Combinatorial Mosaic Proteins)

[0233] Methods for generating multimers are a feature of the present invention. Multimers comprise at least two monomer domains and/or immuno-domains. For example, multimers of the invention can comprise from 2 to about 10 monomer domains and/or immuno-domains, from 2 and about 8 monomer domains and/or immuno-domains, from about 3 and about 10 monomer domains and/or immuno-domains, about 7 monomer domains and/or immuno-domains, about 6 monomer domains and/or immuno-domains, about 5 monomer domains and/or immuno-domains, or about 4 monomer domains and/or immuno-domains. In some embodiments, the multimer comprises at least 3 monomer domains and/or immuno-domains. Typically, the monomer domains have been pre-selected for binding to the target molecule of interest.

[0234] In some embodiments, each monomer domain specifically binds to one target molecule. In some of these embodiments, each monomer binds to a different position (analogous to an epitope) on a target molecule. Multiple monomer domains and/or immuno-domains that bind to the same target molecule results in an avidity effect resulting in improved avidity of the multimer for the target molecule compared to each individual monomer. In some embodiments, the multimer has an avidity of at least about 1.5, 2, 3, 4, 5, 10, 20, 50 or 100 times the avidity of a monomer domain alone.

[0235] In another embodiment, the multimer comprises monomer domains with specificities for different target molecules. For example, multimers of such diverse monomer domains can specifically bind different components of a viral replication system or different serotypes of a virus. In some embodiments, at least one monomer domain binds to a toxin and at least one monomer domain binds to a cell surface molecule, thereby acting as a mechanism to target the toxin. In some embodiments, at least two monomer domains and/or immuno-domains of the multimer bind to different target molecules in a target cell or tissue. Similarly, therapeutic molecules can be targeted to the cell or tissue by binding a therapeutic agent to a monomer of the multimer that also contains other monomer domains and/or immuno-domains having cell or tissue binding specificity.

[0236] Multimers can comprise a variety of combinations of monomer domains. For example, in a single multimer, the selected monomer domains can be the same or identical, optionally, different or non-identical. In addition, the selected monomer domains can comprise various different monomer domains from the same monomer domain family, or various monomer domains from different domain families, or optionally, a combination of both.

[0237] Multimers that are generated in the practice of the present invention may be any of the following:

[0238] (1) A homo-multimer (a multimer of the same domain, i.e., A1-A1-A1-A1);

[0239] (2) A hetero-multimer of different domains of the same domain class, e.g., A1-A2-A3-A4. For example, hetero-multimer include multimers where A1, A2, A3 and A4 are different non-naturally occurring variants of a particular LDL-receptor class A domains, or where some of A1, A2, A3, and A4 are naturally-occurring variants of a LDL-receptor class A domain (see, e.g., FIG. 10).

[0240] (3) A hetero-multimer of domains from different monomer domain classes, e.g., A1-B2-A2-B1. For example, where A1 and A2 are two different monomer domains (either naturally occurring or non-naturally-occurring) from LDL-receptor class A, and B1 and B2 are two different monomer domains (either naturally occurring or non-naturally occurring) from class EGF-like domain).

[0241] Multimer libraries employed in the practice of the present invention may contain homo-multimers, hetero-multimers of different monomer domains (natural or non-natural) of the same monomer class, or hetero-multimers of monomer domains (natural or non-natural) from different monomer classes, or combinations thereof. Exemplary heteromultimers comprising immuno-domains include dimers of, e.g., minibodies, single domain antibodies and Fabs, wherein the dimers are linked by a covalent linker. Other exemplary multimers include, e.g., trimers and higher level (e.g., tetramers) multimers of minibodies, single domain antibodies and Fabs. Yet more exemplary multimers include, e.g., dimers, trimers and higher level multimers of single chain antibody fragments, wherein the single chain antibodies are not linked covalently.

[0242] The present invention provides multimers of V_{H} and V_{L} domains that associate to form multimers of Fvs as depicted in FIG. 13 and FIGS. 14B and C. As used herein, the term “Fv” refers to a non-covalently associated V_{H}V_{L} dimer. Such a dimer is depicted, for example, in FIG. 13A, where each pair of overlapping dark and white ellipses represents a single Fv. Fv multimers of the present invention do not comprise a light variable domain covalently linked directly to a heavy variable domain from the same Fv. However, Fv multimers of the present invention can comprise a covalent linkage of the light variable domains and heavy variable domains of the same Fv, that are separated by at least one or more domains. For example, exemplary conformations of a multimer are V_{H1}-V_{H2}-V_{L1}-V_{L2}, or V_{H1}-V_{L2}-VL₁-V_{H2} (where V_{L#} and V_{H#} represent the heavy and light variable domains, respectively).

[0243] In these and other embodiments, the heavy and light variable domains are aligned such that the corresponding heavy and light variable domains associate to form the corresponding Fv (i.e., Fv₁=V_{H1}V_{L1}, FV₂=V_{H2}V_{L2}, etc.). FIGS. 14B and C illustrate such Fv multimers. Those of ordinary skill in the art will readily appreciate that such Fv multimers can comprise additional heavy or light variable domains of an Fv, to form relatively large multimers of, for example, six, eight of more immuno-domains. See, e.g., FIG. 13. The Fvs in an Fv multimer of the present invention are not scFvs (i.e., V_{L1} is not covalently linked to V_{H1}).

[0244] Monomer domains, as described herein, are also readily employed in a immuno-domain-containing heteromultimer (i.e., a multimer that has at least one immuno-domain variant and one monomer domain variant). Thus, multimers of the present invention may have at least one immuno-domain such as a minibody, a single-domain antibody, a single chain variable fragment (ScFv), or a Fab fragment; and at least one monomer domain, such as, for example, an EGF-like domain, a Kringle-domain, a fibronectin type I domain, a fibronectin type II domain, a fibronectin type III domain, a PAN domain, a Gla domain, a SRCR domain, a Kunitz/Bovine pancreatic trypsin Inhibitor domain, a Kazal-type serine protease inhibitor domain, a Trefoil (P-type) domain, a von Willebrand factor type C domain, an Anaphylatoxin-like domain, a CUB domain, a thyroglobulin type I repeat, LDL-receptor class A domain, a Sushi domain, a Link domain, a Thrombospondin type I domain, an Immunoglobulin-like domain, a C-type lectin domain, a MAM domain, a von Willebrand factor type A domain, a Somatomedin B domain, a WAP-type four disulfide core domain, a F5/8 type C domain, a Hemopexin domain, an SH2 domain, an SH3 domain, a Laminin-type EGF-like domain, a C2 domain, or variants thereof.

[0245] Domains need not be selected before the domains are linked to form multimers. On the other hand, the domains can be selected for the ability to bind to a target molecule before being linked into multimers. Thus, for example, a multimer can comprise two domains that bind to one target molecule and a third domain that binds to a second target molecule.

[0246] The selected monomer domains are joined by a linker to form a multimer. For example, a linker is positioned between each separate discrete monomer domain in a multimer. Typically, immuno-domains are also linked to each other or to monomer domains via a linker moiety. Linker moieties that can be readily employed to link immuno-domain variants together are the same as those described for multimers of monomer domain variants. Exemplary linker moieties suitable for joining immuno-domain variants to other domains into multimers are described herein.

[0247] Joining the selected monomer domains via a linker can be accomplished using a variety of techniques known in the art. For example, combinatorial assembly of polynucleotides encoding selected monomer domains can be achieved by restriction digestion and re-ligation, by PCR-based, self-priming overlap reactions, or other rembinant methods. The linker can be attached to a monomer before the monomer is identified for its ability to bind to a target multimer or after the monomer has been selected for the ability to bind to a target multimer.

[0248] The linker can be naturally-occurring, synthetic or a combination of both. For example, the synthetic linker can be a randomized linker, e.g., both in sequence and size. In one aspect, the randomized linker can comprise a fully randomized sequence, or optionally, the randomized linker can be based on natural linker sequences. The linker can comprise, e.g,. a non-polypeptide moiety, a polynucleotide, a polypeptide or the like.

[0249] A linker can be rigid, or alternatively, flexible, or a combination of both. Linker flexibility can be a function of the composition of both the linker and the monomer domains that the linker interacts with. The linker joins two selected monomer domain, and maintains the monomer domains as separate discrete monomer domains. The linker can allow the separate discrete monomer domains to cooperate yet maintain separate properties such as multiple separate binding sites for the same ligand in a multimer, or e.g., multiple separate binding sites for different ligands in a multimer. In some cases, a disulfide bridge exists between two linked monomer domains or between a linker and a monomer domain. In some embodiments, the monmer domains and/or linkers comprise metal-binding centers.

[0250] Choosing a suitable linker for a specific case where two or more monomer domains (i.e. polypeptide chains) are to be connected may depend on a variety of parameters including, e.g. the nature of the monomer domains, the structure and nature of the target to which the polypeptide multimer should bind and/or the stability of the peptide linker towards proteolysis and oxidation.

[0251] The present invention provides methods for optimizing the choice of linker once the desired monomer domains/variants have been identified. Generally, libraries of multimers having a composition that is fixed with regard to monomer domain composition, but variable in linker composition and length, can be readily prepared and screened as described above.

[0252] Typically, the linker polypeptide may predominantly include amino acid residues selected from the group consisting of Gly, Ser, Ala and Thr. For example, the peptide linker may contain at least 75% (calculated on the basis of the total number of residues present in the peptide linker), such as at least 80%, e.g. at least 85% or at least 90% of amino acid residues selected from the group consisting of Gly, Ser, Ala and Thr. The peptide linker may also consist of Gly, Ser, Ala and/or Thr residues only. The linker polypeptide should have a length, which is adequate to link two monomer domains in such a way that they assume the correct conformation relative to one another so that they retain the desired activity, for example as antagonists of a given receptor.

[0253] A suitable length for this purpose is a length of at least one and typically fewer than about 50 amino acid residues, such as 2-25 amino acid residues, 5-20 amino acid residues, 5-15 amino acid residues, 8-12 amino acid residues or 11 residues. Similarly, the polypeptide encoding a linker can range in size, e.g., from about 2 to about 15 amino acids, from about 3 to about 15, from about 4 to about 12, about 10, about 8, or about 6 amino acids. In methods and compositions involving nucleic acids, such as DNA, RNA, or combinations of both, the polynucleotide containing the linker sequence can be, e.g., between about 6 nucleotides and about 45 nucleotides, between about 9 nucleotides and about 45 nucleotides, between about 12 nucleotides and about 36 nucleotides, about 30 nucleotides, about 24 nucleotides, or about 18 nucleotides. Likewise, the amino acid residues selected for inclusion in the linker polypeptide should exhibit properties that do not interfere significantly with the activity or function of the polypeptide multimer. Thus, the peptide linker should on the whole not exhibit a charge which would be inconsistent with the activity or function of the polypeptide multimer, or interfere with internal folding, or form bonds or other interactions with amino acid residues in one or more of the monomer domains which would seriously impede the binding of the polypeptide multimer to the target in question.

[0254] In another embodiment of the invention, the peptide linker is selected from a library where the amino acid residues in the peptide linker are randomized for a specific set of monomer domains in a particular polypeptide multimer. A flexible linker could be used to find suitable combinations of monomer domains, which is then optimized using this random library of variable linkers to obtain linkers with optimal length and geometry. The optimal linkers may contain the minimal number of amino acid residues of the right type that participate in the binding to the target and restrict the movement of the monomer domains relative to each other in the polypeptide multimer when not bound to the target.

[0255] The use of naturally occurring as well as artificial peptide linkers to connect polypeptides into novel linked fusion polypeptides is well known in the literature (Hallewell et al. (1989), J. Biol. Chem. 264, 5260-5268; Alfthan et al. (1995), Protein Eng. 8, 725-731; Robinson & Sauer (1996), Biochemistry 35, 109-116; Khandekar et al. (1997), J. Biol. Chem. 272, 32190-32197; Fares et al. (1998), Endocrinology 139, 2459-2464; Smallshaw et al. (1999), Protein Eng. 12, 623-630; U.S. Pat. No. 5,856,456).

[0256] One example where the use of peptide linkers is widespread is for production of single-chain antibodies where the variable regions of a light chain (V_{L}) and a heavy chain (V_{H}) are joined through an artificial linker, and a large number of publications exist within this particular field. A widely used peptide linker is a 15mer consisting of three repeats of a Gly-Gly-Gly-Gly-Ser (SEQ ID NO: 240) amino acid sequence ((Gly₄Ser)₃). Other linkers have been used, and phage display technology, as well as, selective infective phage technology has been used to diversify and select appropriate linker sequences (Tang et al. (1996), J. Biol. Chem. 271, 15682-15686; Hennecke et al. (1998), Protein Eng. 11, 405-410). Peptide linkers have been used to connect individual chains in hetero- and homo-dimeric proteins such as the T-cell receptor, the lambda Cro repressor, the P22 phage Arc repressor, IL-12, TSH, FSH, IL-5, and interferon-y. Peptide linkers have also been used to create fusion polypeptides. Various linkers have been used and in the case of the Arc repressor phage display has been used to optimize the linker length and composition for increased stability of the single-chain protein (Robinson and Sauer (1998), Proc. Natl. Acad. Sci. USA 95, 5929-5934).

[0257] Another type of linker is an intein, i.e. a peptide stretch which is expressed with the single-chain polypeptide, but removed post-translationally by protein splicing. The use of inteins is reviewed by F. S. Gimble in Chemistry and Biology, 1998, Vol 5, No. 10 pp. 251-256.

[0258] Still another way of obtaining a suitable linker is by optimizing a simple linker, e.g. (Gly₄Ser)ₙ (SEQ ID NO: 240), through random mutagenesis.

[0259] As mentioned above, it is generally preferred that the peptide linker possess at least some flexibility. Accordingly, in some embodiments, the peptide linker contains 1-25 glycine residues, 5-20 glycine residues, 5-15 glycine residues or 8-12 glycine residues. The peptide linker will typically contain at least 50% glycine residues, such as at least 75% glycine residues. In some embodiments of the invention, the peptide linker comprises glycine residues only.

[0260] The peptide linker may, in addition to the glycine residues, comprise other residues, in particular residues selected from the group consisting of Ser, Ala and Thr, in particular Ser. Thus, one example of a specific peptide linker includes a peptide linker having the amino acid sequence Glyₓ-Xaa-Gly_{y}-Xaa-Gly_{z} (SEQ ID NO: 203), wherein each Xaa is independently selected from the group consisting Ala, Val, Leu, Ile, Met, Phe, Trp, Pro, Gly, Ser, Thr, Cys, Tyr, Asn, Gln, Lys, Arg, His, Asp and Glu, and wherein x, y and z are each integers in the range from 1-5. In some embodiments, each Xaa is independently selected from the group consisting of Ser, Ala and Thr, in particular Ser. More particularly, the peptide linker has the amino acid sequence Gly-Gly-Gly-Xaa-Gly-Gly-Gly-Xaa-Gly-Gly-Gly (SEQ ID NO: 204), wherein each Xaa is independently selected from the group consisting Ala, Val, Leu, Ile, Met, Phe, Trp, Pro, Gly, Ser, Thr, Cys, Tyr, Asn, Gln, Lys, Arg, His, Asp and Glu. In some embodiments, each Xaa is independently selected from the group consisting of Ser, Ala and Thr, in particular Ser.

[0261] In some cases it may be desirable or necessary to provide some rigidity into the peptide linker. This may be accomplished by including proline residues in the amino acid sequence of the peptide linker. Thus, in another embodiment of the invention, the peptide linker comprises at least one proline residue in the amino acid sequence of the peptide linker. For example, the peptide linker has an amino acid sequence, wherein at least 25%, such as at least 50%, e.g. at least 75%, of the amino acid residues are proline residues. In one particular embodiment of the invention, the peptide linker comprises proline residues only.

[0262] In some embodiments of the invention, the peptide linker is modified in such a way that an amino acid residue comprising an attachment group for a non-polypeptide moiety is introduced. Examples of such amino acid residues may be a cysteine residue (to which the non-polypeptide moiety is then subsequently attached) or the amino acid sequence may include an in vivo N-glycosylation site (thereby attaching a sugar moiety (in vivo) to the peptide linker). An additional option is to genetically incorporate non-natural amino acids using evolved tRNAs and tRNA synthetases (see, e.g., U.S. patent application Publication Ser. No. 2003/0082575) into the monomer domains or linkers. For example, insertion of keto-tyrosine allows for site-specific coupling to expressed monomer domains or multimers.

[0263] In some embodiments of the invention, the peptide linker comprises at least one cysteine residue, such as one cysteine residue. Thus, in some embodiments of the invention the peptide linker comprises amino acid residues selected from the group consisting of Gly, Ser, Ala, Thr and Cys. In some embodiments, such a peptide linker comprises one cysteine residue only.

[0264] In a further embodiment, the peptide linker comprises glycine residues and cysteine residue, such as glycine residues and cysteine residues only. Typically, only one cysteine residue will be included per peptide linker. Thus, one example of a specific peptide linker comprising a cysteine residue, includes a peptide linker having the amino acid sequence Glyₙ-Cys-Glyₘ (SEQ ID NO: 205), wherein n and m are each integers from 1-12, e.g., from 3-9, from 4-8, or from 4-7. More particularly, the peptide linker may have the amino acid sequence GGGGG-C-GGGGG (SEQ ID NO: 206).

[0265] This approach (i.e. introduction of an amino acid residue comprising an attachment group for a non-polypeptide moiety) may also be used for the more rigid proline-containing linkers. Accordingly, the peptide linker may comprise proline and cysteine residues, such as proline and cysteine residues only. An example of a specific proline-containing peptide linker comprising a cysteine residue, includes a peptide linker having the amino acid sequence Proₙ-Cys-Proₘ (SEQ ID NO: 207), wherein n and m are each integers from 1-12, preferably from 3-9, such as from 4-8 or from 4-7. More particularly, the peptide linker may have the amino acid sequence PPPPP-C-PPPPP (SEQ ID NO: 208).

[0266] In some embodiments, the purpose of introducing an amino acid residue, such as a cysteine residue, comprising an attachment group for a non-polypeptide moiety is to subsequently attach a non-polypeptide moiety to said residue. For example, non-polypeptide moieties can improve the serum half-life of the polypeptide multimer. Thus, the cysteine residue can be covalently attached to a non-polypeptide moiety. Preferred examples of non-polypeptide moieties include polymer molecules, such as PEG or mPEG, in particular mPEG as well as non-polypeptide therapeutic agents.

[0267] The skilled person will acknowledge that amino acid residues other than cysteine may be used for attaching a non-polypeptide to the peptide linker. One particular example of such other residue includes coupling the non-polypeptide moiety to a lysine residue.

[0268] Another possibility of introducing a site-specific attachment group for a non-polypeptide moiety in the peptide linker is to introduce an in vivo N-glycosylation site, such as one in vivo N-glycosylation site, in the peptide linker. For example, an in vivo N-glycosylation site may be introduced in a peptide linker comprising amino acid residues selected from the group consisting of Gly, Ser, Ala and Thr. It will be understood that in order to ensure that a sugar moiety is in fact attached to said in vivo N-glycosylation site, the nucleotide sequence encoding the polypeptide multimer must be inserted in a glycosylating, eukaryotic expression host.

[0269] A specific example of a peptide linker comprising an in vivo N-glycosylation site is a peptide linker having the amino acid sequence Glyₙ-Asn-Xaa-Ser/Thr-Glyₘ (SEQ ID NO: 209), preferably Glyₙ-Asn-Xaa-Thr-Glyₘ (SEQ ID NO: 210), wherein Xaa is any amino acid residue except proline, and wherein n and m are each integers in the range from 1-8, preferably in the range from 2-5.

[0270] Often, the amino acid sequences of all peptide linkers present in the polypeptide multimer will be identical. Nevertheless, in certain embodiments the amino acid sequences of all peptide linkers present in the polypeptide multimer may be different. The latter is believed to be particular relevant in case the polypeptide multimer is a polypeptide tri-mer or tetra-mer and particularly in such cases where an amino acid residue comprising an attachment group for a non-polypeptide moiety is included in the peptide linker.

[0271] Quite often, it will be desirable or necessary to attach only a few, typically only one, non-polypeptide moieties/moiety (such as mpEG, a sugar moiety or a non-polypeptide therapeutic agent) to the polypeptide multimer in order to achieve the desired effect, such as prolonged serum-half life. Evidently, in case of a polypeptide tri-mer, which will contain two peptide linkers, only one peptide linker is typically required to be modified, e.g. by introduction of a cysteine residue, whereas modification of the other peptide linker will typically not be necessary not. In this case all (both) peptide linkers of the polypeptide multimer (tri-mer) are different.

[0272] Accordingly, in a further embodiment of the invention, the amino acid sequences of all peptide linkers present in the polypeptide multimer are identical except for one, two or three peptide linkers, such as except for one or two peptide linkers, in particular except for one peptide linker, which has/have an amino acid sequence comprising an amino acid residue comprising an attachment group for a non-polypeptide moiety. Preferred examples of such amino acid residues include cysteine residues of in vivo N-glycosylation sites.

[0273] A linker can be a native or synthetic linker sequence. An exemplary native linker includes, e.g., the sequence between the last cysteine of a first LDL receptor A domain and the first cysteine of a second LDL receptor A domain can be used as a linker sequence. Analysis of various A domain linkages reveals that native linkers range from at least 3 amino acids to fewer than 20 amino acids, e.g., 4, 5, 6, 7, 8, 9, 10, 11, 12, 13, 14, 15, 16, 17, or 18 amino acids long. However, those of skill in the art will recognize that longer or shorter linker sequences can be used. An exemplary A domain linker sequence is depicted in FIG. 8. In some embodiments, the linker is a 6-mer of the following sequence A₁A₂A₃A₄A₅A₆ (SEQ ID NO: 244), wherein A₁ is selected from the amino acids A, P, T, Q, E and K; A₂ and A₃ are any amino acid except C, F, Y, W, or M; A₄ is selected from the amino acids S, G and R; A₅ is selected from the amino acids H, P, and R; and A₆ is the amino acid, T.

[0274] Methods for generating multimers from monomer domains and/or immuno-domains can include joining the selected domains with at least one linker to generate at least one multimer, e.g., the multimer can comprise at least two of the monomer domains and/or immuno-domains and the linker. The multimer(s) is then screened for an improved avidity or affinity or altered specificity for the desired ligand or mixture of ligands as compared to the selected monomer domains. A composition of the multimer produced by the method is included in the present invention.

[0275] In other methods, the selected multimer domains are joined with at least one linker to generate at least two multimers, wherein the two multimers comprise two or more of the selected monomer domains and the linker. The two or more multimers are screened for an improved avidity or affinity or altered specificity for the desired ligand or mixture of ligands as compared to the selected monomer domains. Compositions of two or more multimers produced by the above method are also features of the invention.

[0276] Typically, multimers of the present invention are a single discrete polypeptide. Multimers of partial linker-domain-partial linker moieties are an association of multiple polypeptides, each corresponding to a partial linker-domain-partial linker moiety.

[0277] When multimers capable of binding relatively large targets are desired, they can be generated by a “walking” selection method. This method is carried out by providing a library of monomer domains and screening the library of monomer domains for affinity to a first target molecule. Once at least one monomer that binds to the target is identified, that monomer is covalently linked to a new library or each remaining member of the original library of monomer domains. This new library of multimers (dimers) is then screened for multimers that bind to the target with an increased affinity, and a multimer that binds to the target with an increased affinity can be identified. The “walking” monomer selection method provides a way to assemble a multimer that is composed of monomers that can act additively or even synergistically with each other given the restraints of linker length. This walking technique is very useful when selecting for and assembling multimers that are able to bind large target proteins with high affinity. The walking method can be repeated to add more monomers thereby resulting in a multimer comprising 2, 3, 4, 5, 6, 7, 8 or more monomers linked together.

[0278] In some embodiments, the selected multimer comprises more than two domains. Such multimers can be generated in a step fashion, e.g., where the addition of each new domain is tested individually and the effect of the domains is tested in a sequential fashion. See, e.g., FIG. 6. In an alternate embodiment, domains are linked to form multimers comprising more than two domains and selected for binding without prior knowledge of how smaller multimers, or alternatively, how each domain, bind.

[0279] The methods of the present invention also include methods of evolving multimers. The methods can comprise, e.g., any or all of the following steps: providing a plurality of different nucleic acids, where each nucleic acid encoding a monomer domain; translating the plurality of different nucleic acids, which provides a plurality of different monomer domains; screening the plurality of different monomer domains for binding of the desired ligand or mixture of ligands; identifying members of the plurality of different monomer domains that bind the desired ligand or mixture of ligands, which provides selected monomer domains; joining the selected monomer domains with at least one linker to generate at least one multimer, wherein the at least one multimer comprises at least two of the selected monomer domains and the at least one linker; and, screening the at least one multimer for an improved affinity or avidity or altered specificity for the desired ligand or mixture of ligands as compared to the selected monomer domains.

[0280] Additional variation can be introduced by inserting linkers of different length and composition between domains. This allows for the selection of optimal linkers between domains. In some embodiments, optimal length and composition of linkers will allow for optimal binding of domains. In some embodiments, the domains with a particular binding affinity(s) are linked via different linkers and optimal linkers are selected in a binding assay. For example, domains are selected for desired binding properties and then formed into a library comprising a variety of linkers. The library can then be screened to identify optimal linkers. Alternatively, multimer libraries can be formed where the effect of domain or linker on target molecule binding is not known.

[0281] Methods of the present invention also include generating one or more selected multimers by providing a plurality of monomer domains and/or immuno-domains. The plurality of monomer domains and/or immuno-domains are screened for binding of a desired ligand or mixture of ligands. Members of the plurality of domains that bind the desired ligand or mixture of ligands are identified, thereby providing domains with a desired affinity. The identified domains are joined with at least one linker to generate the multimers, wherein each multimer comprises at least two of the selected domains and the at least one linker; and, the multimers are screened for an improved affinity or avidity or altered specificity for the desired ligand or mixture of ligands as compared to the selected domains, thereby identifying the one or more selected multimers.

[0282] Selection of multimers can be accomplished using a variety of techniques including those mentioned above for identifying monomer domains. Other selection methods include, e.g., a selection based on an improved affinity or avidity or altered specificity for the ligand compared to selected monomer domains. For example, a selection can be based on selective binding to specific cell types, or to a set of related cells or protein types (e.g., different virus serotypes). Optimization of the property selected for, e.g., avidity of a ligand, can then be achieved by recombining the domains, as well as manipulating amino acid sequence of the individual monomer domains or the linker domain or the nucleotide sequence encoding such domains, as mentioned in the present invention.

[0283] One method for identifying multimers can be accomplished by displaying the multimers. As with the monomer domains, the multimers are optionally expressed or displayed on a variety of display systems, e.g., phage display, ribosome display, polysome display, nucleotide-linked display (see, e.g., U.S. Pat. Nos. 6,281,344; 6,194,550, 6,207,446, 6,214,553, and 6,258,558) and/or cell surface display, as described above. Cell surface displays can include but are not limited to E. coli, yeast or mammalian cells. In addition, display libraries of multimers with multiple binding sites can be panned for avidity or affinity or altered specificity for a ligand or for multiple ligands.

[0284] Monomers or multimers can be screened for target binding activity in yeast cells using a two-hybrid screening assay. In this type of screen the monomer or multimer library to be screened is cloned into a vector that directs the formation of a fusion protein between each monomer or multimer of the library and a yeast transcriptional activator fragment (i.e., Gal4). Sequences encoding the “target” protein are cloned into a vector that results in the production of a fusion protein between the target and the remainder of the Gal4 protein (the DNA binding domain). A third plasmid contains a reporter gene downstream of the DNA sequence of the Gal4 binding site. A monomer that can bind to the target protein brings with it the Gal4 activation domain, thus reconstituting a functional Gal4 protein. This functional Gal4 protein bound to the binding site upstream of the reporter gene results in the expression of the reporter gene and selection of the monomer or multimer as a target binding protein. (see Chien et.al. (1991) Proc. Natl. Acad. Sci. (USA) 88:9578; Fields S. and Song O. (1989) Nature 340: 245) Using a two-hybrid system for library screening is further described in U.S. Pat. No. 5,811,238 (see also Silver S. C. and Hunt S. W. (1993) Mol. Biol. Rep. 17:155; Durfee et al. (1993) Genes Devel. 7:555; Yang et al. (1992) Science 257:680; Luban et al. (1993) Cell 73:1067; Hardy et al. (1992) Genes Devel. 6:801; Bartel et al. (1993) Biotechniques 14:920; and Vojtek et al. (1993) Cell 74:205). Another useful screening system for carrying out the present invention is the E. coli/BCCP interactive screening system (Germino et al. (1993) Proc. Nat. Acad. Sci. (U.S.A.) 90:993; Guarente L. (1993) Proc. Nat. Acad. Sci. (U.S.A.) 90:1639).

[0285] Other variations include the use of multiple binding compounds, such that monomer domains, multimers or libraries of these molecules can be simultaneously screened for a multiplicity of ligands or compounds that have different binding specificity. Multiple predetermined ligands or compounds can be concomitantly screened in a single library, or sequential screening against a number of monomer domains or multimers. In one variation, multiple ligands or compounds, each encoded on a separate bead (or subset of beads), can be mixed and incubated with monomer domains, multimers or libraries of these molecules under suitable binding conditions. The collection of beads, comprising multiple ligands or compounds, can then be used to isolate, by affinity selection, selected monomer domains, selected multimers or library members. Generally, subsequent affinity screening rounds can include the same mixture of beads, subsets thereof, or beads containing only one or two individual ligands or compounds. This approach affords efficient screening, and is compatible with laboratory automation, batch processing, and high throughput screening methods.

[0286] In another embodiment, multimers can be simultaneously screened for the ability to bind multiple ligands, wherein each ligand comprises a different label. For example, each ligand can be labeled with a different fluorescent label, contacted simultaneously with a multimer or multimer library. Multimers with the desired affinity are then identified (e.g., by FACS sorting) based on the presence of the labels linked to the desired labels.

[0287] Libraries of either monomer domains or multimers (referred in the following discussion for convenience as “affinity agents”) can be screened (i.e., panned) simultaneously against multiple ligands in a number of different formats. For example, multiple ligands can be screened in a simple mixture, in an array, displayed on a cell or tissue (e.g., a cell or tissue provides numerous molecules that can be bound by the monomer domains or multimers of the invention), and/or immobilized. The libraries of affinity agents can optionally be displayed on yeast or phage display systems. Similarly, if desired, the ligands (e.g., encoded in a cDNA library) can be displayed in a yeast or phage display system.

[0288] Initially, the affinity agent library is panned against the multiple ligands. Optionally, the resulting “hits” are panned against the ligands one or more times to enrich the resulting population of affinity agents. See, e.g., FIG. 24.

[0289] If desired, the identity of the individual affinity agents and/or ligands can be determined. In some embodiments, affinity agents are displayed on phage. Affinity agents identified as binding in the initial screen are divided into a first and second portion. See, e.g., FIG. 25. The first portion is infected into bacteria, resulting in either plaques or bacterial colonies, depending on the type of phage used. The expressed phage are immobilized and then probed with ligands displayed in phage selected as described below.

[0290] The second portion are coupled to beads or otherwise immobilized and a phage display library containing at least some of the ligands in the original mixture is contacted to the immobilized second portion. Those phage that bind to the second portion are subsequently eluted and contacted to the immobilized phage described in the paragraph above. Phage-phage interactions are detected (e.g., using a monoclonal antibody specific for the ligand-expressing phage) and the resulting phage polynucleotides can be isolated.

[0291] In some embodiments, the identity of a affinity agent-ligand pair is determined. For example, when both the affinity agent and the ligand are displayed on a phage or yeast, the DNA from the pair can be isolated and sequenced. In some embodiments, polynucleotides specific for the ligand and affinity agent are amplified. Amplification primers for each reaction can include 5′ sequences that are complementary such that the resulting amplification products are fused, thereby forming a hybrid polynucleotide comprising a polynucleotide encoding at least a portion of the affinity agent and at least a portion of the ligand. The resulting hybrid can be used to probe affinity agent or ligand (e.g., cDNA-encoded) polynucleotide libraries to identify both affinity agent and ligand. See, e.g., FIG. 26.

[0292] The above-described methods can be readily combined with “walking” to simultaneous generate and identify multiple multimers, each of which bind to a ligand in a mixture of ligands. In these embodiments, a first library of affinity agents (monomer domains, immuno domains or multimers) are panned against multiple ligands and the eluted affinity agents are linked to the first or a second library of affinity agents to form a library of multimeric affinity agents (e.g., comprising 2, 3, 4, 5, 6, 7, 8, 9, or more monomer or immuno domains), which are subsequently panned against the multiple ligands. This method can be repeated to continue to generate larger multimeric affinity agents. Of course, at each stage, the panning is optionally repeated to enrich for significant binders.

[0293] The selected multimers of the above methods can be further manipulated, e.g., by recombining or shuffling the selected multimers (recombination can occur between or within multimers or both), mutating the selected multimers, and the like. This results in altered multimers which then can be screened and selected for members that have an enhanced property compared to the selected multimer, thereby producing selected altered multimers.

[0294] Linkers, multimers or selected multimers produced by the methods indicated above and below are features of the present invention. Libraries comprising multimers, e.g, a library comprising about 100, 250, 500 or more members produced by the methods of the present invention or selected by the methods of the present invention are provided. In some embodiments, one or more cell comprising members of the libraries, are also included. Libraries of the recombinant polypeptides are also a feature of the present invention, e.g., a library comprising about 100, 250, 500 or more different recombinant polypetides.

[0295] Compositions of the present invention can be bound to a matrix of an affinity material, e.g., the recombinant polypeptides. Examples of affinity material include, e.g., beads, a column, a solid support, and/or the like.

[0296] Suitable linkers employed in the practice of the present invention include an obligate heterodimer of partial linker moieties. The term “obligate heterodimer” (also referred to as “affinity peptides”) refers herein to a dimer of two partial linker moieties that differ from each other in composition, and which associate with each other in a non-covalent, specific manner to join two domains together. The specific association is such that the two partial linkers associate substantially with each other as compared to associating with other partial linkers. Thus, in contrast to multimers of the present invention that are expressed as a single polypeptide, multimers of domains that are linked together via heterodimers are assembled from discrete partial linker-monomer-partial linker units. Assembly of the heterodimers can be achieved by, for example, mixing. Thus, if the partial linkers are polypeptide segments, each partial linker-monomer-partial linker unit may be expressed as a discrete peptide prior to multimer assembly. A disulfide bond can be added to covalently lock the peptides together following the correct non-covalent pairing. A multimer containing such obligate heterodimers is depicted in FIG. 12. Partial linker moieties that are appropriate for forming obligate heterodimers include, for example, polynucleotides, polypeptides, and the like. For example, when the partial linker is a polypeptide, binding domains are produced individually along with their unique linking peptide (i.e., a partial linker) and later combined to form multimers. See, e.g., Madden, M., Aldwin, L., Gallop, M. A., and Stemmer, W. P. C. (1993) Peptide linkers: Unique self-associative high-affinity peptide linkers. Thirteenth American Peptide Symposium, Edmonton, Canada (abstract). The spatial order of the binding domains in the multimer is thus mandated by the heterodimeric binding specificity of each partial linker. Partial linkers can contain terminal amino acid sequences that specifically bind to a defined heterologous amino acid sequence. An example of such an amino acid sequence is the Hydra neuropeptide head activator as described in Bodenmuller et al., The neuropeptide head activator loses its biological activity by dimerization, (1986) EMBO J 5(8):1825-1829. See, e.g., U.S. Pat. No. 5,491,074 and WO 94/28173. These partial linkers allow the multimer to be produced first as monomer-partial linker units or partial linker-monomer-partial linker units that are then mixed together and allowed to assemble into the ideal order based on the binding specificities of each partial linker. Alternatively, monomers linked to partial linkers can be contacted to a surface, such as a cell, in which multiple monomers can associate to form higher avidity complexes via partial linkers. In some cases, the association will form via random Brownian motion.

[0297] When the partial linker comprises a DNA binding motif, each monomer domain has an upstream and a downstream partial linker (i.e., Lp-domain-Lp, where “Lp” is a representation of a partial linker) that contains a DNA binding protein with exclusively unique DNA binding specificity. These domains can be produced individually and then assembled into a specific multimer by the mixing of the domains with DNA fragments containing the proper nucleotide sequences (i.e., the specific recognition sites for the DNA binding proteins of the partial linkers of the two desired domains) so as to join the domains in the desired order. Additionally, the same domains may be assembled into many different multimers by the addition of DNA sequences containing various combinations of DNA binding protein recognition sites. Further randomization of the combinations of DNA binding protein recognition sites in the DNA fragments can allow the assembly of libraries of multimers. The DNA can be synthesized with backbone analogs to prevent degradation in vivo.

[0298] A significant advantage of the present invention is that known ligands, or unknown ligands can be used to select the monomer domains and/or multimers. No prior information regarding ligand structure is required to isolate the monomer domains of interest or the multimers of interest. The monomer domains, immuno-domains and/or multimers identified can have biological activity, which is meant to include at least specific binding affinity for a selected or desired ligand, and, in some instances, will further include the ability to block the binding of other compounds, to stimulate or inhibit metabolic pathways, to act as a signal or messenger, to stimulate or inhibit cellular activity, and the like. Monomer domains can be generated to function as ligands for receptors where the natural ligand for the receptor has not yet been identified (orphan receptors). These orphan ligands can be created to either block or activate the receptor top which they bind.

[0299] A single ligand can be used, or optionally a variety of ligands can be used to select the monomer domains, immuno-domains and/or multimers. A monomer domain and/or immuno-domain of the present invention can bind a single ligand or a variety of ligands. A multimer of the present invention can have multiple discrete binding sites for a single ligand, or optionally, can have multiple binding sites for a variety of ligands.

[0300] In some embodiments, the multimer comprises monomer domains and/or immuno-domains with specificities for different proteins. The different proteins can be related or unrelated. Examples of related proteins including members of a protein family or different serotypes of a virus. Alternatively, the monomer domains and/or immuno-domains of a multimer can target different molecules in a physiological pathway (e.g., different blood coagulation proteins). In yet other embodiments, monomer domains and/or immuno-domains bind to proteins in unrelated pathways (e.g., two domains bind to blood factors , two other domains and/or immuno-domains bind to inflammation-related proteins and a fifth binds to serum albumin). In another embodiment, a multimer is comprised of monomer domains that bind to different pathogens or contaminants of interest. Such multimers are useful to as a single detection agent capable of detecting for the possibility of any of a number of pathogens or contaminants.

[0301] The final conformation of the multimers containing immuno-domains can be a ring structure which would offer enhanced stability and other desired characteristics. These cyclic multimers can be expressed as a single polypeptide chain or may be assembled from multiple discrete polypeptide chains. Cyclic multimers assembled from discrete polypeptide chains are typically an assembly of two polypeptide chains. FIG. 13B depicts a cyclic multimer of two polypeptide chains. The formation of cyclic multimer structures can be vastly effected by the spatial arrangement (i.e., distance and order) and dimerization specificity of the individual domains. Parameters such as, for example, linker length, linker composition and order of immuno-domains, can be varied to generate a library of cyclic multimers having diverse structures. Libraries of cyclic multimers can be readily screened in accordance with the invention methods described herein. to identify cyclic multimers that bind to desired target molecules. After the multimers are generated, optionally a cyclization step can be carried out to generate a library of cyclized multimers that can be further screened for desired binding activity.

[0302] These cyclic ring structures can be, for example, composed of a multimer of ScFv immuno-domains wherein the immuno-domains are split such that a coiling of the polypeptide multimer chain is required for the immuno-domains to form their proper dimeric structures (e.g., N-terminus-V_{L}1-V_{L}2-V_{L}3-V_{L}4-V_{L}5-V_{L}6-V_{L}7-V_{L}8-V_{H}1-V_{H}2-V_{H}3-V_{H}4-V_{H}5-V_{H}6-V_{H}7-V_{H}8-C-terminus, or N-terminus-V_{L}1-V_{H}²-V_{L}3-V_{H}4-V_{H}1-V_{L}2-V_{H}3-V_{L}4-C-terminus, and the like). An example of such a cyclic structure is shown in FIG. 13A. The ring could also be formed by the mixing of two polypeptide chains wherein each chain contained half of the immuno-domains. For example, one chain contains the V_{L} domains and the other chain contains the V_{H} domains such that the correct pairs of V_{L}/V_{H} domains are brought together upon the two strands binding. The circularization of the chains can be mandated by changing the frame of the domain order (i.e., polypeptide one: N-terminus-V_{L}1-V_{L}2-V_{L}3-V_{L}4-V_{L}5-V_{L}6-V_{L}7-V_{L}8-C-terminus and polypeptide two: N-terminus-V_{H}4-V_{H}5-V_{H}6-V_{H}7-V_{H}8-V_{H}1-V_{H}2-V_{H}3-C-terminus) as depicted in FIG. 13B.

[0303] A single polypeptide chain that forms a tetrameric ring structure could be very stable and have strong binding characteristics. An example of such a ring is shown in FIG. 13C.

[0304] Cyclic multimers can also be formed by encoding or attaching or linking at least one dimerizing domain at or near the N-terminus of a multimer protein and encoding or attaching or linking at least one second dimerizing domain at or near the C-terminus of the multimer protein wherein the first and second dimerization domain have a strong affinity for each other. As used herein, the term “dimerization domain” refers to a protein binding domain (of either immunological or non-immunological origin) that has the ability to bind to another protein binding domain with great strength and specificity such as to form a dimer. Cyclization of the multimer occurs upon binding of the first and the second dimerization domains to each other. Specifically, dimerization between the two domains will cause the multimer to adopt a cyclical structure. The dimerization domain can form a homodimer in that the domain binds to a protein that is identical to itself. The dimerization domain may form a heterodimer in that the domain binds to a protein binding domain that is different from itself. Some uses for such dimerization domains are described in, e.g., U.S. Pat. No. 5,491,074 and WO 94/28173.

[0305] In some embodiments, the multimers of the invention bind to the same or other multimers to form aggregates. Aggregation can be mediated, for example, by the presence of hydrophobic domains on two monomer domains and/or immuno-domains, resulting in the formation of non-covalent interactions between two monomer domains and/or immuno-domains. Alternatively, aggregation may be facilitated by one or more monomer domains in a multimer having binding specificity for a monomer domain in another multimer. Aggregates can also form due to the presence of affinity peptides on the monomer domains or multimers. Aggregates can contain more target molecule binding domains than a single multimer.

[0306] Multimers with affinity for both a cell surface target and a second target, avidity effects can be increased. In some cases, membrane fluidity can be more flexible than protein linkers in optimizing (by self-assembly) the spacing and valency of the interactions. In some cases, multimers will bind to two different targets, each on a different cell or one on a cell and another on a molecule with multiple binding sites. See. e.g., FIGS. 27 and 28.

### 3. Therapeutic and Prophylactic Treatment Methods

[0307] The present invention also includes methods of therapeutically or prophylactically treating a disease or disorder by administering in vivo or ex vivo one or more nucleic acids or polypeptides of the invention described above (or compositions comprising a pharmaceutically acceptable excipient and one or more such nucleic acids or polypeptides) to a subject, including, e.g., a mammal, including a human, primate, mouse, pig, cow, goat, rabbit, rat, guinea pig, hamster, horse, sheep; or a non-mammalian vertebrate such as a bird (e.g., a chicken or duck), fish, or invertebrate.

[0308] In one aspect of the invention, in ex vivo methods, one or more cells or a population of cells of interest of the subject (e.g., tumor cells, tumor tissue sample, organ cells, blood cells, cells of the skin, lung, heart, muscle, brain, mucosae, liver, intestine, spleen, stomach, lymphatic system, cervix, vagina, prostate, mouth, tongue, etc.) are obtained or removed from the subject and contacted with an amount of a selected monomer domain and/or multimer of the invention that is effective in prophylactically or therapeutically treating the disease, disorder, or other condition. The contacted cells are then returned or delivered to the subject to the site from which they were obtained or to another site (e.g., including those defined above) of interest in the subject to be treated. If desired, the contacted cells can be grafted onto a tissue, organ, or system site (including all described above) of interest in the subject using standard and well-known grafting techniques or, e.g., delivered to the blood or lymph system using standard delivery or transfusion techniques.

[0309] The invention also provides in vivo methods in which one or more cells or a population of cells of interest of the subject are contacted directly or indirectly with an amount of a selected monomer domain and/or multimer of the invention effective in prophylactically or therapeutically treating the disease, disorder, or other condition. In direct contact/administration formats, the selected monomer domain and/or multimer is typically administered or transferred directly to the cells to be treated or to the tissue site of interest (e.g., tumor cells, tumor tissue sample, organ cells, blood cells, cells of the skin, lung, heart, muscle, brain, mucosae, liver, intestine, spleen, stomach, lymphatic system, cervix, vagina, prostate, mouth, tongue, etc.) by any of a variety of formats, including topical administration, injection (e.g., by using a needle or syringe), or vaccine or gene gun delivery, pushing into a tissue, organ, or skin site. The selected monomer domain and/or multimer can be delivered, for example, intramuscularly, intradermally, subdermally, subcutaneously, orally, intraperitoneally, intrathecally, intravenously, or placed within a cavity of the body (including, e.g., during surgery), or by inhalation or vaginal or rectal administration.

[0310] In in vivo indirect contact/administration formats, the selected monomer domain and/or multimer is typically administered or transferred indirectly to the cells to be treated or to the tissue site of interest, including those described above (such as, e.g., skin cells, organ systems, lymphatic system, or blood cell system, etc.), by contacting or administering the polypeptide of the invention directly to one or more cells or population of cells from which treatment can be facilitated. For example, tumor cells within the body of the subject can be treated by contacting cells of the blood or lymphatic system, skin, or an organ with a sufficient amount of the selected monomer domain and/or multimer such that delivery of the selected monomer domain and/or multimer to the site of interest (e.g., tissue, organ, or cells of interest or blood or lymphatic system within the body) occurs and effective prophylactic or therapeutic treatment results. Such contact, administration, or transfer is typically made by using one or more of the routes or modes of administration described above.

[0311] In another aspect, the invention provides ex vivo methods in which one or more cells of interest or a population of cells of interest of the subject (e.g., tumor cells, tumor tissue sample, organ cells, blood cells, cells of the skin, lung, heart, muscle, brain, mucosae, liver, intestine, spleen, stomach, lymphatic system, cervix, vagina, prostate, mouth, tongue, etc.) are obtained or removed from the subject and transformed by contacting said one or more cells or population of cells with a polynucleotide construct comprising a nucleic acid sequence of the invention that encodes a biologically active polypeptide of interest (e.g., a selected monomer domain and/or multimer) that is effective in prophylactically or therapeutically treating the disease, disorder, or other condition. The one or more cells or population of cells is contacted with a sufficient amount of the polynucleotide construct and a promoter controlling expression of said nucleic acid sequence such that uptake of the polynucleotide construct (and promoter) into the cell(s) occurs and sufficient expression of the target nucleic acid sequence of the invention results to produce an amount of the biologically active polypeptide, encoding a selected monomer domain and/or multimer, effective to prophylactically or therapeutically treat the disease, disorder, or condition. The polynucleotide construct can include a promoter sequence (e.g., CMV promoter sequence) that controls expression of the nucleic acid sequence of the invention and/or, if desired, one or more additional nucleotide sequences encoding at least one or more of another polypeptide of the invention, a cytokine, adjuvant, or co-stimulatory molecule, or other polypeptide of interest.

[0312] Following transfection, the transformed cells are returned, delivered, or transferred to the subject to the tissue site or system from which they were obtained or to another site (e.g., tumor cells, tumor tissue sample, organ cells, blood cells, cells of the skin, lung, heart, muscle, brain, mucosae, liver, intestine, spleen, stomach, lymphatic system, cervix, vagina, prostate, mouth, tongue, etc.) to be treated in the subject. If desired, the cells can be grafted onto a tissue, skin, organ, or body system of interest in the subject using standard and well-known grafting techniques or delivered to the blood or lymphatic system using standard delivery or transfusion techniques. Such delivery, administration, or transfer of transformed cells is typically made by using one or more of the routes or modes of administration described above. Expression of the target nucleic acid occurs naturally or can be induced (as described in greater detail below) and an amount of the encoded polypeptide is expressed sufficient and effective to treat the disease or condition at the site or tissue system.

[0313] In another aspect, the invention provides in vivo methods in which one or more cells of interest or a population of cells of the subject (e.g., including those cells and cells systems and subjects described above) are transformed in the body of the subject by contacting the cell(s) or population of cells with (or administering or transferring to the cell(s) or population of cells using one or more of the routes or modes of administration described above) a polynucleotide construct comprising a nucleic acid sequence of the invention that encodes a biologically active polypeptide of interest (e.g., a selected monomer domain and/or multimer) that is effective in prophylactically or therapeutically treating the disease, disorder, or other condition.

[0314] The polynucleotide construct can be directly administered or transferred to cell(s) suffering from the disease or disorder (e.g., by direct contact using one or more of the routes or modes of administration described above). Alternatively, the polynucleotide construct can be indirectly administered or transferred to cell(s) suffering from the disease or disorder by first directly contacting non-diseased cell(s) or other diseased cells using one or more of the routes or modes of administration described above with a sufficient amount of the polynucleotide construct comprising the nucleic acid sequence encoding the biologically active polypeptide, and a promoter controlling expression of the nucleic acid sequence, such that uptake of the polynucleotide construct (and promoter) into the cell(s) occurs and sufficient expression of the nucleic acid sequence of the invention results to produce an amount of the biologically active polypeptide effective to prophylactically or therapeutically treat the disease or disorder, and whereby the polynucleotide construct or the resulting expressed polypeptide is transferred naturally or automatically from the initial delivery site, system, tissue or organ of the subject's body to the diseased site, tissue, organ or system of the subject's body (e.g., via the blood or lymphatic system). Expression of the target nucleic acid occurs naturally or can be induced (as described in greater detail below) such that an amount of expressed polypeptide is sufficient and effective to treat the disease or condition at the site or tissue system. The polynucleotide construct can include a promoter sequence (e.g., CMV promoter sequence) that controls expression of the nucleic acid sequence and/or, if desired, one or more additional nucleotide sequences encoding at least one or more of another polypeptide of the invention, a cytokine, adjuvant, or co-stimulatory molecule, or other polypeptide of interest.

[0315] In each of the in vivo and ex vivo treatment methods as described above, a composition comprising an excipient and the polypeptide or nucleic acid of the invention can be administered or delivered. In one aspect, a composition comprising a pharmaceutically acceptable excipient and a polypeptide or nucleic acid of the invention is administered or delivered to the subject as described above in an amount effective to treat the disease or disorder.

[0316] In another aspect, in each in vivo and ex vivo treatment method described above, the amount of polynucleotide administered to the cell(s) or subject can be an amount such that uptake of said polynucleotide into one or more cells of the subject occurs and sufficient expression of said nucleic acid sequence results to produce an amount of a biologically active polypeptide effective to enhance an immune response in the subject, including an immune response induced by an immunogen (e.g., antigen). In another aspect, for each such method, the amount of polypeptide administered to cell(s) or subject can be an amount sufficient to enhance an immune response in the subject, including that induced by an immunogen (e.g., antigen).

[0317] In yet another aspect, in an in vivo or in vivo treatment method in which a polynucleotide construct (or composition comprising a polynucleotide construct) is used to deliver a physiologically active polypeptide to a subject, the expression of the polynucleotide construct can be induced by using an inducible on- and off-gene expression system. Examples of such on- and off-gene expression systems include the Tet-On™ Gene Expression System and Tet-Off™ Gene Expression System (see, e.g., Clontech Catalog 2000, pg. 110-111 for a detailed description of each such system), respectively. Other controllable or inducible on- and off-gene expression systems are known to those of ordinary skill in the art. With such system, expression of the target nucleic of the polynucleotide construct can be regulated in a precise, reversible, and quantitative manner. Gene expression of the target nucleic acid can be induced, for example, after the stable transfected cells containing the polynucleotide construct comprising the target nucleic acid are delivered or transferred to or made to contact the tissue site, organ or system of interest. Such systems are of particular benefit in treatment methods and formats in which it is advantageous to delay or precisely control expression of the target nucleic acid (e.g., to allow time for completion of surgery and/or healing following surgery; to allow time for the polynucleotide construct comprising the target nucleic acid to reach the site, cells, system, or tissue to be treated; to allow time for the graft containing cells transformed with the construct to become incorporated into the tissue or organ onto or into which it has been spliced or attached, etc.).

### 4. Additional Multimer Uses

[0318] The potential applications of multimers of the present invention are diverse and include any use where an affinity agent is desired. For example, the invention can be used in the application for creating antagonists, where the selected monomer domains or multimers block the interaction between two proteins. Optionally, the invention can generate agonists. For example, multimers binding two different proteins, e.g., enzyme and substrate, can enhance protein function, including, for example, enzymatic activity and/or substrate conversion.

[0319] Other applications include cell targeting. For example, multimers consisting of monomer domains and/or immuno-domains that recognize specific cell surface proteins can bind selectively to certain cell types. Applications involving monomer domains and/or immuno-domains as antiviral agents are also included. For example, multimers binding to different epitopes on the virus particle can be useful as antiviral agents because of the polyvalency. Other applications can include, but are not limited to, protein purification, protein detection, biosensors, ligand-affinity capture experiments and the like. Furthermore, domains or multimers can be synthesized in bulk by conventional means for any suitable use, e.g., as a therapeutic or diagnostic agent.

[0320] The present invention further provides a method for extending the half-life of a protein of interest in an animal. The protein of interest can be any protein with therapeutic, prophylactic, or otherwise desirable functionality. This method comprises first providing a monomer domain that has been identified as a binding protein that specifically binds to a half-life extender such as a blood-carried molecule or cell, such as serum albumin (e.g., human serum albumin), IgG, red blood cells, etc. The half-life extenderbinding monomer is then covalently linked to another monomer domain that has a binding affinity for the protein of interest. These three proteins (half-life extender-binding monomer, protein of interest-binding monomer, and the protein of interest) are then administered to a mammal where they will associate with the half-life extender to form a complex of the four components. This complex formation results in the half-life extender protecting the bound proteins from proteolytic degradation and thereby extending the half-life of the protein (see, e.g., example 3 below). One variation of this use of the invention includes the half-life extender-binding monomer being covalently linked to the protein of interest. The protein of interest may include a monomer domain, a multimer of monomer domains, or a synthetic drug. Alternatively, monomers that bind to either immunoglobulins or erythrocytes could be generated using the above method and could be used for half-life extension.

[0321] The half-life extender-binding multimers are typically multimers of at least two domains, chimeric domains, or mutagenized domains. Suitable domains include all of those described herein, that are further screened and selected for binding to a half-life extender. The half-life extender-binding multimers are generated in accordance with the methods for making multimers described herein, using, for example, monomer domains pre-screened for half-life extender-binding activity. For example, some half-life extender-binding LDL receptor class A-domain monomers are described in Example 2 below.

[0322] The present invention also provides a method for the suppression of or lowering of an immune response in a mammal. This method comprises first selecting a monomer domain that binds to an immunosuppressive target. Such an “immunosuppressive target” is defined as any protein that when bound by another protein produces an immunosuppressive result in a mammal. The immunosuppressive monomer domain can then be either administered directly or can be covalently linked to another monomer domain or to another protein that will provide the desired targeting of the immunosuppressive monomer. The immunosuppressive multimers are typically multimers of at least two domains, chimeric domains, or mutangenized domains. Suitable domains include all of those described herein and are further screened and selected for binding to an immunosuppressive target. Immunosuppressive multimers are generated in accordance with the methods for making multimers described herein, using, for example, monomer domains pre-screened for CD40L-binding activity. Generation of CD40L-binding LDL receptor class A-domain monomers are described below in Example 4.

[0323] In some embodiments, the monomer domains are used for ligand inhibition, ligand clearance or ligand stimulation. Possible ligands in these methods, include, e.g., cytokines or chemokines.

[0324] If inhibition of ligand binding to a receptor is desired, a monomer domain is selected that binds to the ligand at a portion of the ligand that contacts the ligand's receptor, or that binds to the receptor at a portion of the receptor that binds contacts the ligand, thereby preventing the ligand-receptor interaction. The monomer domains can optionally be linked to a half-life extender, if desired.

[0325] Ligand clearance refers to modulating the half-life of a soluble ligand in bodily fluid. For example, most monomer domains, absent a half-life extender, have a short half-life. Thus, binding of a monomer domain to the ligand will reduce the half-life of the ligand, thereby reducing ligand concentration. The portion of the ligand bound by the monomer domain will generally not matter, though it may be beneficial to bind the ligand at the portion of the ligand that binds to its receptor, thereby further inhibiting the ligand's effect. This method is useful for reducing the concentration of any molecule in the bloodstream.

[0326] Alternatively, a multimer comprising a first monomer domain that binds to a half-life extender and a second monomer domain that binds to a portion of the ligand that does not bind to the ligand's receptor can be used to increase the half-life of the ligand.

[0327] In another embodiment, a multimer comprising a first monomer domain that binds to the ligand and a second monomer domain that binds to the receptor can be used to increase the effective affinity of the ligand for the receptor.

[0328] In another embodiment, multimers comprising at least two monomers that bind to receptors are used to bring two receptors into proximity by both binding the multimer, thereby activating the receptors.

[0329] In some embodiments, multimers with two different monomers can be used to employ a target-driven avidity increase. For example, a first monomer can be targeted to a cell surface molecule on a first cell type and a second monomer can be targeted to a surface molecule on a second cell type. By linking the two monomers to forma a multimer and then adding the multimer to a mixture of the two cell types, binding will occur between the cells once an initial binding event occurs between one multimer and two cells, other multimers will also bind both cells.

[0330] Further examples of potential uses of the invention include monomer domains, and multimers thereof, that are capable of drug binding (e.g., binding radionucleotides for targeting, pharmaceutical binding for half-life extension of drugs, controlled substance binding for overdose treatment and addiction therapy), immune function modulating (e.g., immunogenicity blocking by binding such receptors as CTLA-4, immunogenicity enhancing by binding such receptors as CD80, or complement activation by Fc type binding), and specialized delivery (e.g., slow release by linker cleavage, electrotransport domains, dimerization domains, or specific binding to: cell entry domains, clearance receptors such as FcR, oral delivery receptors such as plgR for trans-mucosal transport, and blood-brain transfer receptors such as transferrinR).

[0331] Additionally, monomers or multimers with different functionality may be combined to form multimers with combined functions. For example, the described HSA-binding monomer and the described CD40L-binding monomer can both be added to another multimer to both lower the immunogenicity and increase the half-life of the multimer.

[0332] In further embodiments, monomers or multimers can be linked to a detectable label (e.g., Cy3, Cy5, etc.) or linked to a reporter gene product (e.g., CAT, luciferase, horseradish peroxidase, alkaline phosphotase, GFP, etc.).

[0333] In some embodiments, the monomers of the invention are selected for the ability to bind antibodies from specific animals, e.g., goat, rabbit, mouse, etc., for use as a secondary reagent in detection assays.

[0334] In some cases, a pair of monomers or multimers are selected to bind to the same target (i.e., for use in sandwich-based assays). To select a matched maxybody pair, two different maxybodies typically are able to bind the target protein simultaneously. One approach to identify such pairs involves the following:

[0335] (1) immobilizing the phage mixture that was previously selected to bind the target protein

[0336] (2) contacting the target protein to the immobilized phage and washing;

[0337] (3) contacting the phage mixture to the bound target and washing; and

[0338] (4) eluting the bound phage without eluting the immobilized phage.

[0339] In some embodiments, different phage populations with different drug markers are used.

[0340] One use of the multimers or monomer domains of the invention is use to replace antibodies or other affinity agents in detection or other affinity-based assays. Thus, in some embodiments, monomer domains or multimers are selected against the ability to bind components other than a target in a mixture. The general approach can include performing the affinity selection under conditions that closely resemble the conditions of the assay, including mimicking the composition of a sample during the assay. Thus, a step of selection could include contacting a monomer domain or multimer to a mixture not including the target ligand and selecting against any monomer domains or multimers that bind to the mixture. Thus, the mixtures (absent the target ligand, which could be depleted using an antibody, monomer domain or multimer) representing the sample in an assay (serum, blood, tissue, cells, urine, semen, etc) can be used as a blocking agent.

### 5. Further Manipulating Monomer Domains and/or Multimer Nucleic Acids and Polypeptides

[0341] As mentioned above, the polypeptide of the present invention can be altered. Descriptions of a variety of diversity generating procedures for generating modified or altered nucleic acid sequences encoding these polypeptides are described above and below in the following publications and the references cited therein: Soong, N. et al., Molecular breeding of viruses, (2000) Nat Genet 25(4):436-439; Stemmer, et al., Molecular breeding of viruses for targeting and other clinical properties, (1999) Tumor Targeting 4:1-4; Ness et al., DNA Shuffling ofsubgenomic sequences of subtilisin, (1999) Nature Biotechnology 17:893-896; Chang et al., Evolution of a cytokine using DNA family shuffling, (1999) Nature Biotechnology 17:793-797; Minshull and Stemmer, Protein evolution by molecular breeding, (1999) Current Opinion in Chemical Biology 3:284-290; Christians et al., Directed evolution of thymidine kinase for AZT phosphorylation using DNA family shuffling, (1999) Nature Biotechnology 17:259-264; Crameri et al., DNA shuffling of a family of genes from diverse species accelerates directed evolution, (1998) Nature 391:288-291; Crameri et al., Molecular evolution of an arsenate detoxification pathway by DNA shuffling, (1997) Nature Biotechnology 15:436-438; Zhang et al., Directed evolution of an effective fucosidase from a galactosidase by DNA shuffling and screening (1997) Proc. Natl. Acad. Sci. USA 94:4504-4509; Patten et al., Applications of DNA Shuffling to Pharmaceuticals and Vaccines, (1997) Current Opinion in Biotechnology 8:724-733; Crameri et al., Construction and evolution of antibody-phage libraries by DNA shuffling, (1996) Nature Medicine 2:100-103; Crameri et al., Improved green fluorescent protein by molecular evolution using DNA shuffling, (1996) Nature Biotechnology 14:315-319; Gates et al., Affinity selective isolation of ligands from peptide libraries through display on a lac repressor ‘headpiece dimer’, (1996) Journal of Molecular Biology 255:373-386; Stemmer, Sexual PCR and Assembly PCR, (1996) In: The Encyclopedia of Molecular Biology. VCH Publishers, New York. pp.447-457; Crameri and Stemmer, Combinatorial multiple cassette mutagenesis creates all the permutations of mutant and wildtype cassettes, (1995) Bio Techniques 18:194-195; Stemmer et al., Single-step assembly of a gene and entire plasmid form large numbers of oligodeoxy-ribonucleotides, (1995) Gene, 164:49-53; Stemmer, The Evolution of Molecular Computation, (1995) Science 270: 1510; Stemmer. Searching Sequence Space, (1995) Bio/Technology 13:549-553; Stemmer, Rapid evolution of a protein in vitro by DNA shuffling, (1994) Nature 370:389-391; and Stemmer, DNA shuffling by random fragmentation and reassembly: In vitro recombination for molecular evolution, (1994) Proc. Natl. Acad. Sci. USA 91:10747-10751.

[0342] Mutational methods of generating diversity include, for example, site-directed mutagenesis (Ling et al., Approaches to DNA mutagenesis: an overview, (1997) Anal Biochem. 254(2): 157-178; Dale et al., Oligonucleotide-directed random mutagenesis using the phosphorothioate method, (1996) Methods Mol. Biol. 57:369-374; Smith, In vitro mutagenesis, (1985) Ann. Rev. Genet. 19:423-462; Botstein & Shortle, Strategies and applications of in vitro mutagenesis, (1985) Science 229:1193-1201; Carter, Site-directed mutagenesis, (1986) Biochem. J. 237:1-7; and Kunkel, The efficiency of oligonucleotide directed mutagenesis, (1987) in Nucleic Acids & Molecular Biology (Eckstein, F. and Lilley, D. M. J. eds., Springer Verlag, Berlin)); mutagenesis using uracil containing templates (Kunkel, Rapid and efficient site-specific mutagenesis without phenotypic selection, (1985) Proc. Natl. Acad. Sci. USA 82:488-492; Kunkel et al., Rapid and efficient site-specific mutagenesis without phenotypic selection, (1987) Methods in Enzymol. 154, 367-382; and Bass et al., Mutant Trp repressors with new DNA-binding specificities, (1988) Science 242:240-245); oligonucleotide-directed mutagenesis ((1983) Methods in Enzymol. 100: 468-500; (1987) Methods in Enzymol. 154: 329-350; Zoller & Smith, Oligonucleotide-directed mutagenesis using M13-derived vectors: an efficient and general procedure for the production of point mutations in any DNA fragment, (1982) Nucleic Acids Res. 10:6487-6500; Zoller & Smith, Oligonucleotide-directed mutagenesis of DNA fragments cloned into M13 vectors, (1983) Methods in Enzymol. 100:468-500; and Zoller & Smith, Oligonucleotide-directed mutagenesis: a simple method using two oligonucleotide primers and a single-stranded DNA template, (1987) Methods in Enzymol. 154:329-350); phosphorothioate-modified DNA mutagenesis (Taylor et al., The use of phosphorothioate-modified DNA in restriction enzyme reactions to prepare nicked DNA, (1985) Nucl. Acids Res. 13: 8749-8764; Taylor et al., The rapid generation of oligonucleotide-directed mutations at high frequency using phosphorothioate-modified DNA, (1985) Nucl. Acids Res. 13: 8765-8787; Nakamaye & Eckstein, Inhibition of restriction endonuclease Nci I cleavage by phosphorothioate groups and its application to oligonucleotide-directed mutagenesis, (1986) Nucl. Acids Res. 14: 9679-9698; Sayers et al., Y-T Exonucleases in phosphorothioate-based oligonucleotide-directed mutagenesis, (1988) Nucl. Acids Res. 16:791-802; and Sayers et al., Strand specific cleavage of phosphorothioate-containing DNA by reaction with restriction endonucleases in the presence of ethidium bromide, (1988) Nucl. Acids Res. 16: 803-814); mutagenesis using gapped duplex DNA (Kramer et al., The gapped duplex DNA approach to oligonucleotide-directed mutation construction, (1984) Nucl. Acids Res. 12: 9441-9456; Kramer & Fritz Oligonucleotide-directed construction of mutations via gapped duplex DNA, (1987) Methods in Enzymol. 154:350-367; Kramer et al., Improved enzymatic in vitro reactions in the gapped duplex DNA approach to oligonucleotide-directed construction of mutations, (1988) Nucl. Acids Res. 16: 7207; and Fritz et al., Oligonucleotide-directed construction of mutations: a gapped duplex DNA procedure without enzymatic reactions in vitro, (1988) Nucl. Acids Res. 16: 6987-6999).

[0343] Additional suitable methods include point mismatch repair (Kramer et al., Point Mismatch Repair, (1984) Cell 38:879-887), mutagenesis using repair-deficient host strains (Carter et al., Improved oligonucleotide site-directed mutagenesis using M13 vectors, (1985) Nucl. Acids Res. 13: 4431-4443; and Carter, Improved oligonucleotide-directed mutagenesis using M13 vectors, (1987) Methods in Enzymol. 154: 382-403), deletion mutagenesis (Eghtedarzadeh & Henikoff, Use of oligonucleotides to generate large deletions, (1986) Nucl. Acids Res. 14: 5115), restriction-selection and restriction-purification (Wells et al., Importance of hydrogen-bond formation in stabilizing the transition state of subtilisin, (1986) Phil. Trans. R. Soc. Lond. A 317: 415-423), mutagenesis by total gene synthesis (Nambiar et al., Total synthesis and cloning of a gene coding for the ribonuclease S protein, (1984) Science 223: 1299-1301; Sakamar and Khorana, Total synthesis and expression of a gene for the a-subunit of bovine rod outer segment guanine nucleotide-binding protein (transducin), (1988) Nucl. Acids Res. 14: 6361-6372; Wells et al., Cassette mutagenesis: an efficient method for generation of multiple mutations at defined sites, (1985) Gene 34:315-323; and Grundström et al., Oligonucleotide-directed mutagenesis by microscale ‘shot-gun’ gene synthesis, (1985) Nucl. Acids Res. 13: 3305-3316), double-strand break repair (Mandecki, Oligonucleotide-directed double-strand break repair in plasmids of Escherichia coli: a method for site-specific mutagenesis, (1986) Proc. Natl. Acad. Sci. USA, 83:7177-7181; and Arnold, Protein engineering for unusual environments, (1993) Current Opinion in Biotechnology 4:450-455). Additional details on many of the above methods can be found in Methods in Enzymology Volume 154, which also describes useful controls for trouble-shooting problems with various mutagenesis methods.

[0344] Additional details regarding various diversity generating methods can be found in the following U.S. patents, PCT publications and applications, and EPO publications: U.S. Pat. No. 5,605,793 to Stemmer (Feb. 25, 1997), “Methods for In Vitro Recombination;” U.S. Pat. No. 5,811,238 to Stemmer et al. (Sep. 22, 1998) “Methods for Generating Polynucleotides having Desired Characteristics by Iterative Selection and Recombination;” U.S. Pat. No. 5,830,721 to Stemmer et al. (Nov. 3, 1998), “DNA Mutagenesis by Random Fragmentation and Reassembly;” U.S. Pat. No. 5,834,252 to Stemmer, et al. (Nov. 10, 1998) “End-Complementary Polymerase Reaction;” U.S. Pat. No. 5,837,458 to Minshull, et al. (Nov. 17, 1998), “Methods and Compositions for Cellular and Metabolic Engineering;” WO 95/22625, Stemmer and Crameri, “Mutagenesis by Random Fragmentation and Reassembly;” WO 96/33207 by Stemmer and Lipschutz “End Complementary Polymerase Chain Reaction;” WO 97/20078 by Stemmer and Crameri “Methods for Generating Polynucleotides having Desired Characteristics by Iterative Selection and Recombination;” WO 97/35966 by Minshull and Stemmer, “Methods and Compositions for Cellular and Metabolic Engineering;” WO 99/41402 by Punnonen et al. “Targeting of Genetic Vaccine Vectors;” WO 99/41383 by Punnonen et al. “Antigen Library Immunization;” WO 99/41369 by Punnonen et al. “Genetic Vaccine Vector Engineering;” WO 99/41368 by Punnonen et al. “Optimization of Immunomodulatory Properties of Genetic Vaccines;” EP 752008 by Stemmer and Crameri, “DNA Mutagenesis by Random Fragmentation and Reassembly;” EP 0932670 by Stemmer “Evolving Cellular DNA Uptake by Recursive Sequence Recombination;” WO 99/23107 by Stemmer et al., “Modification of Virus Tropism and Host Range by Viral Genome Shuffling;” WO 99/21979 by Apt et al., “Human Papillomavirus Vectors;” WO 98/31837 by del Cardayre et al. “Evolution of Whole Cells and Organisms by Recursive Sequence Recombination;” WO 98/27230 by Patten and Stemmer, “Methods and Compositions for Polypeptide Engineering;” WO 98/27230 by Stemmer et al., “Methods for Optimization of Gene Therapy by Recursive Sequence Shuffling and Selection,” WO 00/00632, “Methods for Generating Highly Diverse Libraries,” WO 00/09679, “Methods for Obtaining in Vitro Recombined Polynucleotide Sequence Banks and Resulting Sequences,” WO 98/42832 by Arnold et al., “Recombination of Polynucleotide Sequences Using Random or Defined Primers,” WO 99/29902 by Arnold et al., “Method for Creating Polynucleotide and Polypeptide Sequences,” WO 98/41653 by Vind, “An in Vitro Method for Construction of a DNA Library,” WO 98/41622 by Borchert et al., “Method for Constructing a Library Using DNA Shuffling,” and WO 98/42727 by Pati and Zarling, “Sequence Alterations using Homologous Recombination;” WO 00/18906 by Patten et al., “Shuffling of Codon-Altered Genes;” WO 00/04190 by del Cardayre et al. “Evolution of Whole Cells and Organisms by Recursive Recombination;” WO 00/42561 by Crameri et al., “Oligonucleotide Mediated Nucleic Acid Recombination;” WO 00/42559 by Selifonov and Stemmer “Methods of Populating Data Structures for Use in Evolutionary Simulations;” WO 00/42560 by Selifonov et al., “Methods for Making Character Strings, Polynucleotides & Polypeptides Having Desired Characteristics;” WO 01/23401 by Welch et al., “Use of Codon-Varied Oligonucleotide Synthesis for Synthetic Shuffling;” and PCT/US01/06775 “Single-Stranded Nucleic Acid Template-Mediated Recombination and Nucleic Acid Fragment Isolation” by Affholter.

[0345] Another aspect of the present invention includes the cloning and expression of monomer domains, selected monomer domains, multimers and/or selected multimers coding nucleic acids. Thus, multimer domains can be synthesized as a single protein using expression systems well known in the art. In addition to the many texts noted above, general texts which describe molecular biological techniques useful herein, including the use of vectors, promoters and many other topics relevant to expressing nucleic acids such as monomer domains, selected monomer domains, multimers and/or selected multimers, include Berger and Kimmel, Guide to Molecular Cloning Techniques, Methods in Enzymology volume 152 Academic Press, Inc., San Diego, Calif. (Berger); Sambrook et al., Molecular Cloning—A Laboratory Manual (2nd Ed.), Vol. 1-3, Cold Spring Harbor Laboratory, Cold Spring Harbor, N.Y., 1989 (“Sambrook”) and Current Protocols in Molecular Biology, F. M. Ausubel et al., eds., Current Protocols, a joint venture between Greene Publishing Associates, Inc. and John Wiley & Sons, Inc., (supplemented through 1999) (“Ausubel”)). Examples of techniques sufficient to direct persons of skill through in vitro amplification methods, useful in identifying, isolating and cloning monomer domains and multimers coding nucleic acids, including the polymerase chain reaction (PCR) the ligase chain reaction (LCR), Q-replicase amplification and other RNA polymerase mediated techniques (e.g., NASBA), are found in Berger, Sambrook, and Ausubel, as well as Mullis et al., (1987) U.S. Pat. No. 4,683,202; PCR Protocols A Guide to Methods and Applications (Innis et al. eds) Academic Press Inc. San Diego, Calif. (1990) (Innis); Arnheim & Levinson (Oct. 1, 1990) C&EN 36-47; The Journal Of NIH Research (1991) 3, 81-94; (Kwoh et al. (1989) Proc. Natl. Acad. Sci. USA 86, 1173; Guatelli et al. (1990) Proc. Natl. Acad. Sci. USA 87, 1874; Lomell et al. (1989) J. Clin. Chem 35, 1826; Landegren et al., (1988) Science 241, 1077-1080; Van Brunt (1990) Biotechnology 8, 291-294; Wu and Wallace, (1989) Gene 4, 560; Barringer et al. (1990) Gene 89, 117, and Sooknanan and Malek (1995) Biotechnology 13: 563-564. Improved methods of cloning in vitro amplified nucleic acids are described in Wallace et al., U.S. Pat. No. 5,426,039. Improved methods of amplifying large nucleic acids by PCR are summarized in Cheng et al. (1994) Nature 369: 684-685 and the references therein, in which PCR amplicons of up to 40 kb are generated. One of skill will appreciate that essentially any RNA can be converted into a double stranded DNA suitable for restriction digestion, PCR expansion and sequencing using reverse transcriptase and a polymerase. See, Ausubel, Sambrook and Berger, all supra.

[0346] The present invention also relates to the introduction of vectors of the invention into host cells, and the production of monomer domains, selected monomer domains immuno-domains, multimers and/or selected multimers of the invention by recombinant techniques. Host cells are genetically engineered (i.e., transduced, transformed or transfected) with the vectors of this invention, which can be, for example, a cloning vector or an expression vector. The vector can be, for example, in the form of a plasmid, a viral particle, a phage, etc. The engineered host cells can be cultured in conventional nutrient media modified as appropriate for activating promoters, selecting transformants, or amplifying the monomer domain, selected monomer domain, multimer and/or selected multimer gene(s) of interest. The culture conditions, such as temperature, pH and the like, are those previously used with the host cell selected for expression, and will be apparent to those skilled in the art and in the references cited herein, including, e.g., Freshney (1994) Culture of Animal Cells, a Manual of Basic Technique, third edition, Wiley- Liss, New York and the references cited therein.

[0347] As mentioned above, the polypeptides of the invention can also be produced in non-animal cells such as plants, yeast, fungi, bacteria and the like. Indeed, as noted throughout, phage display is an especially relevant technique for producing such polypeptides. In addition to Sambrook, Berger and Ausubel, details regarding cell culture can be found in Payne et al. (1992) Plant Cell and Tissue Culture in Liquid Systems John Wiley & Sons, Inc. New York, N.Y.; Gamborg and Phillips (eds) (1995) Plant Cell, Tissue and Organ Culture; Fundamental Methods Springer Lab Manual, Springer-Verlag (Berlin Heidelberg New York) and Atlas and Parks (eds) The Handbook ofMicrobiological Media (1993) CRC Press, Boca Raton, Fla.

[0348] The present invention also includes alterations of monomer domains, immuno-domains and/or multimers to improve pharmacological properties, to reduce immunogenicity, or to facilitate the transport of the multimer and/or monomer domain into a cell or tissue (e.g., through the blood-brain barrier, or through the skin). These types of alterations include a variety of modifications (e.g., the addition of sugar-groups or glycosylation), the addition of PEG, the addition of protein domains that bind a certain protein (e.g., HSA or other serum protein), the addition of proteins fragments or sequences that signal movement or transport into, out of and through a cell. Additional components can also be added to a multimer and/or monomer domain to manipulate the properties of the multimer and/or monomer domain. A variety of components can also be added including, e.g., a domain that binds a known receptor (e.g., a Fc-region protein domain that binds a Fc receptor), a toxin(s) or part of a toxin, a prodomain that can be optionally cleaved off to activate the multimer or monomer domain, a reporter molecule (e.g., green fluorescent protein), a component that bind a reporter molecule (such as a radionuclide for radiotherapy, biotin or avidin) or a combination of modifications.

### 6. Animal Models

[0349] Another aspect of the invention is the development of specific non-human animal models in which to test the immunogenicity of the monomer or multimer domains. The method of producing such non-human animal model comprises: introducing into at least some cells of a recipient non-human animal, vectors comprising genes encoding a plurality of human proteins from the same family of proteins, wherein the genes are each operably linked to a promoter that is functional in at least some of the cells into which the vectors are introduced such that a genetically modified non-human animal is obtained that can express the plurality of human proteins from the same family of proteins.

[0350] Suitable non-human animals employed in the practice of the present invention include all vertebrate animals, except humans (e.g., mouse, rat, rabbit, sheep, and the like). Typically, the plurality of members of a family of proteins includes at least two members of that family, and usually at least ten family members. In some embodiments, the plurality includes all known members of the family of proteins. Exemplary genes that can be used include those encoding monomer domains, such as, for example, members of the LDL receptor class A-domain family, the EGF-like domain family, as well as the other domain families described herein.

[0351] The non-human animal models of the present invention can be used to screen for immunogenicity of a monomer or multimer domain that is derived from the same family of proteins expressed by the non-human animal model. The present invention includes the non-human animal model made in accordance with the method described above, as well as transgenic non-human animals whose somatic and germ cells contain and express DNA molecules encoding a plurality of human proteins from the same family of proteins (such as the monomer domains described herein), wherein the DNA molecules have been introduced into the transgenic non-human animal at an embryonic stage, and wherein the DNA molecules are each operably linked to a promoter in at least some of the cells in which the DNA molecules have been introduced.

[0352] An example of a mouse model useful for screening LDL receptor class A-domain derived binding proteins is described as follows. Gene clusters encoding the wild type human LDL receptor class A-domain monomers are amplified from human cells using PCR. Almost all of the 200 different A-domains can be amplified with only three separate PCR amplification reactions of about 7 kb each. These fragments are then used to generate transgenic mice according to the method described above. The transgenic mice will recognize the human A-domains as “self”, thus mimicking the “selfness” of a human with regard to A-domains. Individual A-domain-derived monomers or multimers are tested in these mice by injecting the A-domain-derived monomers or multimers into the mice, then analyzing the immune response (or lack of response) generated. The mice are tested to determine if they have developed a mouse anti-human response (MAHR). Monomers and multimers that do not result in the generation of a MAHR are likely to be non-immunogenic when administered to humans.

[0353] Historically, MAHR test in transgenic mice is used to test individual proteins in mice that are transgenic for that single protein. In contrast, the above described method provides a non-human animal model that recognizes an entire family of human proteins as “self,” and that can be used to evaluate a huge number of variant proteins that each are capable of vastly varied binding activities and uses.

### 7. Kits

[0354] Kits comprising the components needed in the methods (typically in an unmixed form) and kit components (packaging materials, instructions for using the components and/or the methods, one or more containers (reaction tubes, columns, etc.)) for holding the components are a feature of the present invention. Kits of the present invention may contain a multimer library, or a single type of multimer. Kits can also include reagents suitable for promoting target molecule binding, such as buffers or reagents that facilitate detection, including detectably-labeled molecules. Standards for calibrating a ligand binding to a monomer domain or the like, can also be included in the kits of the invention.

[0355] The present invention also provides commercially valuable binding assays and kits to practice the assays. In some of the assays of the invention, one or more ligand is employed to detect binding of a monomer domain, immuno-domains and/or multimer. Such assays are based on any known method in the art, e.g., flow cytometry, fluorescent microscopy, plasmon resonance, and the like, to detect binding of a ligand(s) to the monomer domain and/or multimer.

[0356] Kits based on the assay are also provided. The kits typically include a container, and one or more ligand. The kits optionally comprise directions for performing the assays, additional detection reagents, buffers, or instructions for the use of any of these components, or the like. Alternatively, kits can include cells, vectors, (e.g., expression vectors, secretion vectors comprising a polypeptide of the invention), for the expression of a monomer domain and/or a multimer of the invention.

[0357] In a further aspect, the present invention provides for the use of any composition, monomer domain, immuno-domain, multimer, cell, cell culture, apparatus, apparatus component or kit herein, for the practice of any method or assay herein, and/or for the use of any apparatus or kit to practice any assay or method herein and/or for the use of cells, cell cultures, compositions or other features herein as a therapeutic formulation. The manufacture of all components herein as therapeutic formulations for the treatments described herein is also provided.

### 8. Integrated Systems

[0358] The present invention provides computers, computer readable media and integrated systems comprising character strings corresponding to monomer domains, selected monomer domains, multimers and/or selected multimers and nucleic acids encoding such polypeptides. These sequences can be manipulated by in silico shuffling methods, or by standard sequence alignment or word processing software.

[0359] For example, different types of similarity and considerations of various stringency and character string length can be detected and recognized in the integrated systems herein. For example, many homology determination methods have been designed for comparative analysis of sequences of biopolymers, for spell checking in word processing, and for data retrieval from various databases. With an understanding of double-helix pair-wise complement interactions among 4 principal nucleobases in natural polynucleotides, models that simulate annealing of complementary homologous polynucleotide strings can also be used as a foundation of sequence alignment or other operations typically performed on the character strings corresponding to the sequences herein (e.g., word-processing manipulations, construction of figures comprising sequence or subsequence character strings, output tables, etc.). An example of a software package with GOs for calculating sequence similarity is BLAST, which can be adapted to the present invention by inputting character strings corresponding to the sequences herein.

[0360] BLAST is described in Altschul et al., (1990) J. Mol. Biol. 215:403-410. Software for performing BLAST analyses is publicly available through the National Center for Biotechnology Information (available on the World Wide Web at ncbi.nlm.nih.gov). This algorithm involves first identifying high scoring sequence pairs (HSPs) by identifying short words of length W in the query sequence, which either match or satisfy some positive-valued threshold score T when aligned with a word of the same length in a database sequence. T is referred to as the neighborhood word score threshold (Altschul et al., supra). These initial neighborhood word hits act as seeds for initiating searches to find longer HSPs containing them. The word hits are then extended in both directions along each sequence for as far as the cumulative alignment score can be increased. Cumulative scores are calculated using, for nucleotide sequences, the parameters M (reward score for a pair of matching residues; always>0) and N (penalty score for mismatching residues; always<0). For amino acid sequences, a scoring matrix is used to calculate the cumulative score. Extension of the word hits in each direction are halted when: the cumulative alignment score falls off by the quantity X from its maximum achieved value; the cumulative score goes to zero or below, due to the accumulation of one or more negative-scoring residue alignments; or the end of either sequence is reached. The BLAST algorithm parameters W, T, and X determine the sensitivity and speed of the alignment. The BLASTN program (for nucleotide sequences) uses as defaults a wordlength (W) of 11, an expectation (E) of 10, a cutoff of 100, M=5, N=−4, and a comparison of both strands. For amino acid sequences, the BLASTP program uses as defaults a wordlength (W) of 3, an expectation (E) of 10, and the BLOSUM62 scoring matrix (see Henikoff & Henikoff (1989) Proc. Natl. Acad. Sci. USA 89:10915).

[0361] An additional example of a useful sequence alignment algorithm is PILEUP. PILEUP creates a multiple sequence alignment from a group of related sequences using progressive, pairwise alignments. It can also plot a tree showing the clustering relationships used to create the alignment. PILEUP uses a simplification of the progressive alignment method of Feng & Doolittle, (1987) J. Mol. Evol. 35:351-360. The method used is similar to the method described by Higgins & Sharp, (1989) CABIOS 5:151-153. The program can align, e.g., up to 300 sequences of a maximum length of 5,000 letters. The multiple alignment procedure begins with the pairwise alignment of the two most similar sequences, producing a cluster of two aligned sequences. This cluster can then be aligned to the next most related sequence or cluster of aligned sequences. Two clusters of sequences can be aligned by a simple extension of the pairwise alignment of two individual sequences. The final alignment is achieved by a series of progressive, pairwise alignments. The program can also be used to plot a dendogram or tree representation of clustering relationships. The program is run by designating specific sequences and their amino acid or nucleotide coordinates for regions of sequence comparison. For example, in order to determine conserved amino acids in a monomer domain family or to compare the sequences of monomer domains in a family, the sequence of the invention, or coding nucleic acids, are aligned to provide structure-function information.

[0362] In one aspect, the computer system is used to perform “in silico” sequence recombination or shuffling of character strings corresponding to the monomer domains. A variety of such methods are set forth in “Methods For Making Character Strings, Polynucleotides & Polypeptides Having Desired Characteristics” by Selifonov and Stemmer, filed Feb. 5, 1999 (U.S. Ser. No. 60/118854) and “Methods For Making Character Strings, Polynucleotides & Polypeptides Having Desired Characteristics” by Selifonov and Stemmer, filed Oct. 12, 1999 (U.S. Ser. No. 09/416,375). In brief, genetic operators are used in genetic algorithms to change given sequences, e.g., by mimicking genetic events such as mutation, recombination, death and the like. Multi-dimensional analysis to optimize sequences can be also be performed in the computer system, e.g., as described in the '375 application.

[0363] A digital system can also instruct an oligonucleotide synthesizer to synthesize oligonucleotides, e.g., used for gene reconstruction or recombination, or to order oligonucleotides from commercial sources (e.g., by printing appropriate order forms or by linking to an order form on the Internet).

[0364] The digital system can also include output elements for controlling nucleic acid synthesis (e.g., based upon a sequence or an alignment of a recombinant, e.g., shuffled, monomer domain as herein), i.e., an integrated system of the invention optionally includes an oligonucleotide synthesizer or an oligonucleotide synthesis controller. The system can include other operations that occur downstream from an alignment or other operation performed using a character string corresponding to a sequence herein, e.g., as noted above with reference to assays.

### EXAMPLES

[0365] The following example is offered to illustrate, but not to limit the claimed invention.

### Example 1

[0366] This example describes selection of monomer domains and the creation of multimers.

[0367] Starting materials for identifying monomer domains and creating multimers from the selected monomer domains and procedures can be derived from any of a variety of human and/or non-human sequences. For example, to produce a selected monomer domain with specific binding for a desired ligand or mixture of ligands, one or more monomer domain gene(s) are selected from a family of monomer domains that bind to a certain ligand. The nucleic acid sequences encoding the one or more monomer domain gene can be obtained by PCR amplification of genomic DNA or cDNA, or optionally, can be produced synthetically using overlapping oligonucleotides.

[0368] Most commonly, these sequences are then cloned into a cell surface display format (i.e., bacterial, yeast, or mammalian (COS) cell surface display; phage display) for expression and screening. The recombinant sequences are transfected (transduced or transformed) into the appropriate host cell where they are expressed and displayed on the cell surface. For example, the cells can be stained with a labeled (e.g., fluorescently labeled), desired ligand. The stained cells are sorted by flow cytometry, and the selected monomer domains encoding genes are recovered (e.g., by plasmid isolation, PCR or expansion and cloning) from the positive cells. The process of staining and sorting can be repeated multiple times (e.g., using progressively decreasing concentrations of the desired ligand until a desired level of enrichment is obtained). Alternatively, any screening or detection method known in the art that can be used to identify cells that bind the desired ligand or mixture of ligands can be employed.

[0369] The selected monomer domain encoding genes recovered from the desired ligand or mixture of ligands binding cells can be optionally recombined according to any of the methods described herein or in the cited references. The recombinant sequences produced in this round of diversification are then screened by the same or a different method to identify recombinant genes with improved affinity for the desired or target ligand. The diversification and selection process is optionally repeated until a desired affinity is obtained.

[0370] The selected monomer domain nucleic acids selected by the methods can be joined together via a linker sequence to create multimers, e.g., by the combinatorial assembly of nucleic acid sequences encoding selected monomer domains by DNA ligation, or optionally, PCR-based, self-priming overlap reactions. The nucleic acid sequences encoding the multimers are then cloned into a cell surface display format (i.e., bacterial, yeast, or mammalian (COS) cell surface display; phage display) for expression and screening. The recombinant sequences are transfected (transduced or transformed) into the appropriate host cell where they are expressed and displayed on the cell surface. For example, the cells can be stained with a labeled, e.g., fluorescently labeled, desired ligand or mixture of ligands. The stained cells are sorted by flow cytometry, and the selected multimers encoding genes are recovered (e.g., by PCR or expansion and cloning) from the positive cells. Positive cells include multimers with an improved avidity or affinity or altered specificity to the desired ligand or mixture of ligands compared to the selected monomer domain(s). The process of staining and sorting can be repeated multiple times (e.g., using progressively decreasing concentrations of the desired ligand or mixture of ligands until a desired level of enrichment is obtained). Alternatively, any screening or detection method known in the art that can be used to identify cells that bind the desired ligand or mixture of ligands can be employed.

[0371] The selected multimer encoding genes recovered from the desired ligand or mixture of ligands binding cells can be optionally recombined according to any of the methods described herein or in the cited references. The recombinant sequences produced in this round of diversification are then screened by the same or a different method to identify recombinant genes with improved avidity or affinity or altered specificity for the desired or target ligand. The diversification and selection process is optionally repeated until a desired avidity or affinity or altered specificity is obtained.

### Example 2

[0372] This example describes the selection of monomer domains that are capable of binding to Human Serum Albumin (HSA).

[0373] For the production of phages, E. coli DH10B cells (Invitrogen) were transformed with phage vectors encoding a library of LDL receptor class A-domain variants as a fusions to the pIII phage protein. To transform these cells, the electroporation system MicroPulser (Bio-Rad) was used together with cuvettes provided by the same manufacturer. The DNA solution was mixed with 100 μl of the cell suspension, incubated on ice and transferred into the cuvette (electrode gap 1 mm). After pulsing, 2 ml of SOC medium (2% w/v tryptone, 0.5% w/v yeast extract, 10 mM NaCl, 10 mM MgSO₄, 10 mM MgCl₂) were added and the transformation mixture was incubated at 37 C for 1 h. Multiple transformations were combined and diluted in 500 ml 2×YT medium containing 20 μg/m tetracycline and 2 mM CaCl₂. With 10 electroporations using a total of 10 μg ligated DNA 1.2×10⁸ independent clones were obtained.

[0374] 160 ml of the culture, containing the cells which were transformed with the phage vectors encoding the library of the A-domain variant phages, were grown for 24 h at 22 C, 250 rpm and afterwards transferred in sterile centrifuge tubes. The cells were sedimented by centrifugation (15 minutes, 5000 g, 4° C.). The supernatant containing the phage particles was mixed with 1/5 volumes 20% w/v PEG 8000, 15% w/v NaCl, and was incubated for several hours at 4° C. After centrifugation (20 minutes, 10000 g, 4° C.) the precipitated phage particles were dissolved in 2 ml of cold TBS (50 mM Tris, 100 mM NaCl, pH 8.0) containing 2 mM CaCl₂. The solution was incubated on ice for 30 minutes and was distributed into two 1.5 ml reaction vessels. After centrifugation to remove undissolved components (5 minutes, 18500 g, 4° C.) the supernatants were transferred to a new reaction vessel. Phage were reprecipitated by adding 1/5 volumes 20% w/v PEG 8000, 15% w/v NaCl and incubation for 60 minutes on ice. After centrifugation (30 minutes, 18500 g, 4° C.) and removal of the supernatants, the precipitated phage particles were dissolved in a total of 1 ml TBS containing 2 mM CaCl₂. After incubation for 30 minutes on ice the solution was centrifuged as described above. The supernatant containing the phage particles was used directly for the affinity enrichment.

[0375] Affinity enrichment of phage was performed using 96 well plates (Maxisorp, NUNC, Denmark). Single wells were coated for 12 h at RT by incubation with 150 μl of a solution of 100 μg/ml human serum albumin (HSA, Sigma) in TBS. Binding sites remaining after HSA incubation were saturated by incubation with 250 μl 2% w/v bovine serum albumin (BSA) in TBST (TBS with 0.1% v/v Tween 20) for 2 hours at RT. Afterwards, 40 μl of the phage solution, containing approximately 5×10¹¹ phage particles, were mixed with 80 μl TBST containing 3% BSA and 2 mM CaCl₂ for 1 hour at RT. In order to remove non binding phage particles, the wells were washed 5 times for 1 min using 130 μl TBST containing 2 mM CaCl₂.

[0376] Phage bound to the well surface were eluted either by incubation for 15 minutes with 130 μl 0.1 M glycine/HCl pH 2.2 or in a competitive manner by adding 130 μl of 500 μg/ml HSA in TBS. In the first case, the pH of the elution fraction was immediately neutralized after removal from the well by mixing the eluate with 30 μl 1 M Tris/HCl pH 8.0.

[0377] For the amplification of phage, the eluate was used to infect E. coli K91BluKan cells (F⁺). 50 μl of the eluted phage solution were mixed with 50 μl of a preparation of cells and incubated for 10 minutes at RT. Afterwards, 20 ml LB medium containing 20 μg/ml tetracycline were added and the infected cells were grown for 36 h at 22 C, 250 rpm. Afterwards, the cells were sedimented (10 minutes, 5000 g, 4° C.). Phage were recovered from the supernatant by precipitation as described above. For the repeated affinity enrichment of phage particles the same procedure as described in this example was used. After two subsequent rounds of panning against HSA, random colonies were picked and tested for their binding properties against the used target protein.

### Example 3

[0378] This example describes the determination of biological activity of monomer domains that are capable of binding to HSA.

[0379] In order to show the ability of an HSA binding domain to extend the serum half life of an protein in vivo, the following experimental setup was performed. A multimeric A-domain, consisting of an A-domain which was evolved for binding HSA (see Example 2) and a streptavidin binding A-domain was compared to the streptavidin binding A-domain itself. The proteins were injected into mice, which were either loaded or not loaded (as control) with human serum albumin (HSA). Serum levels of a-domain proteins were monitored.

[0380] Therefore, an A-domain, which was evolved for binding HSA (see Example 1) was fused on the genetic level with a streptavidin binding A-domain multimer using standard molecular biology methods (see Maniatis et al.). The resulting genetic construct, coding for an A-domain multimer as well as a hexahistidine tag and a HA tag, were used to produce protein in E. coli. After refolding and affinity tag mediated purification the proteins were dialysed several times against 150 mM NaCl, 5 mM Tris pH 8.0, 100 μM CaCl₂ and sterile filtered (0.45 μM).

[0381] Two sets of animal experiments were performed. In a first set, 1 ml of each prepared protein solution with a concentration of 2.5 μM were injected into the tail vein of separate mice and serum samples were taken 2, 5 and 10 minutes after injection. In a second set, the protein solution described before was supplemented with 50 mg/ml human serum albumin. As described above, 1 ml of each solution was injected per animal. In case of the injected streptavidin binding A-domain dimer, serum samples were taken 2, 5 and 10 minutes after injection, while in case of the trimer, serum samples were taken after 10, 30 and 120 minutes. All experiments were performed as duplicates and individual animals were assayed per timepoint.

[0382] In order to detect serum levels of A-domains in the serum samples, an enzyme linked immunosorbent assay (ELISA) was performed. Therefore, wells of a maxisorp 96 well microtiter plate (NUNC, Denmark) were coated with each 1 μg anti-His₆-antibody in TBS containing 2 mM CaCl₂ for 1 h at 4 C. After blocking remaining binding sites with casein (Sigma) solution for 1 h, wells were washed three times with TBS containing 0.1% Tween and 2 mM CaCl₂. Serial concentration dilutions of the serum samples were prepared and incubated in the wells for 2 h in order to capture the a-domain proteins. After washing as before, anti-HA-tag antibody coupled to horse radish peroxidase (HRP) (Roche Diagnostics, 25 μg/ml) was added and incubated for 2 h. After washing as described above, HRP substrate (Pierce) was added and the detection reaction developed according to the instructions of the manufacturer. Light absorption, reflecting the amount of a-domain protein present in the serum samples, was measured at a wavelength of 450 nm. Obtained values were normalized and plotted against a time scale.

[0383] Evaluation of the obtained values showed a serum half life for the streptavidin binding A-domain of about 4 minutes without presence of HSA respectively 5.2 minutes when the animal was loaded with HSA. The trimer of A-domains, which contained the HSA binding A-domain, exhibited a serum half life of 6.3 minutes without the presence of HSA but a significantly increased half life of 38 minutes when HSA was present in the animal. This clearly indicates that the HSA binding A-domain can be used as a fusion partner to increase the serum half life of any protein, including protein therapeuticals.

### Example 4

[0384] This example describes experiments demonstrating extension of half-life of proteins in blood.

[0385] To further demonstrate that blood half-life of proteins can be extended using monomer domains of the invention, individual monomer domain proteins selected against monkey serum albumin, human serum albumin, human IgG, and human red blood cells were added to aliquots of whole, heparinized human or monkey blood.

[0386] The following list provides sequences of monomer domains analyzed in this example.

| | |
|---|---|
| IG156 | CLSSEFQCQSSGRCIPLAWVCDGDNDCRDDSDEKSCKPRT |
| RBCA | CRSSQFQCNDSRICIPGRWRCDGDNDCQDGSDETGCGDSHILPFSTPGPST |
| RBCB | CPAGEFPCKNGQCLPVTWLCDGVNDCLDGSDEKGCGRPGPGATSAPAA |
| RBC11 | CPPDEFPCKNGQCIPQDWLCDGVNDCLDGSDEKDCGRPGPGATSAPAA |
| CSA-A8 | CGAGQFPCKNGHCLPLNLLCDGVNDCEDNSDEPSELCKALT |

[0387] Blood aliquots containing monomer protein were then added to individual dialysis bags (25,000 MWCO), sealed, and stirred in 4 L of Tris-buffered saline at room temperature overnight.

[0388] Anti-6×His antibody was immobilized by hydrophobic interaction to a 96-well plate (Nunc). Serial dilutions of serum from each blood sample were incubated with the immobilized antibody for 3 hours. Plates were washed to remove unbound protein and probed with α-HA-HRP to detect monomer.

[0389] Monomers identified as having long half-lives in dialysis experiments were constructed to contain either an HA, FLAG, E-Tag, or myc epitope tag. Four monomers were pooled, containing one protein for each tag, to make two pools.

[0390] One monkey was injected subcutaneously per pool, at a dose of 0.25 mg/kg/monomer in 2.5 mL total volume in saline. Blood samples were drawn at 24, 48, 96, and 120 hours. Anti-6×His antibody was immobilized by hydrophobic interaction to a 96-well plate (Nunc). Serial dilutions of serum from each blood sample were incubated with the immobilized antibody for 3 hours. Plates were washed to remove unbound protein and separately probed with α-HA-HRP, α-FLAG-HRP, α-ETag-HRP, and α-myc-HRP to detect the monomer.

### Example 5

[0391] This example describes the determination of biological activity of monomer domains that are capable of binding to CD40L.

[0392] An LDL receptor class A-domain library was screened for monomers capable of binding CD40L using the same screening methods as described above in Example 2, except that recombinant CD40L was used as the target and no competitive elution steps were performed. In order to determine the biological activity of the selected A-domains, proteins were produced in E. coli as inclusion bodies or soluble protein. Biological activity of affinity-tag purified A-domain proteins with binding affinity to CD40L was measured by inhibition of rsCD40L stimulated B cell proliferation. Therefore, B cells were stimulated with Interleukin 4 (IL-4, R&D systems, Minneapolis, Minn.) and recombinant soluble CD40L (rsCD40L, Peprotech, Rocky Hill, N.J.), and incorporation of Tritium-labeled thymidine was measured.

[0393] B cells were enriched from buffy coats of a healthy donor by gradient centrifugation and further purified by FACS. For a typical assay, B cells were transferred to a 96 well microtiter plate (100000 cells per well), and incubated for 3 days in appropriate tissue culture medium with IL-4 (100 μg/ml), rsCD40L (10 μg/ml) as well as different concentrations of selected a-domain variants. During the final 8 hours of incubation, the cultures were pulsed with 1 μCi/well of ³H thymidine (ICN) and the incorporation afterwards measured in a scintillation counter.

[0394] Selected A-domains with binding affinity to CD40L were able to inhibit rsCD40L induced B cell stimulation as shown by lowered thymidine incorporation in B cells that were incubated with the A-domains.

### Example 6

[0395] This example describes the development of a library of multimers comprised of C2 domains.

[0396] A library of DNA sequences encoding monomeric C2 domains is created by assembly PCR as described in Stemmer et al., Gene 164, 49-53 (1995). The oligonucleotides used in this PCR reaction are (SEQ ID NOS: 211-223, respectively, in order of appearance):

5′-acactgcaatcgcgccttacggctCCCGGGCGGATCCTcccataagttca
5′-agctaccaaagtgacannknnknnknnknnknnknnknnknnknnknnknnkccatacgtcgaattgttcat
5′-agctaccaaagtgacaaaaggtgcttttggtgatatgttggatactccagatccatacgtcgaattgttcat
5′-taggaagagaacacgtcattttnnknnknnkattaaccctgtttggaacgagacctttgagt
5′-taggaagagaacacgtcattttaataatgatattaaccctgtttggaacgagacctttgagt
5′-ttggaaatcaccctaatgnnknnknnknnknnknnknnknnkactctaggtacagcaa
5′-ttggaaatcaccctaatggatgcaaattatgttatggacgaaactctaggtacagcaa
5′-aagaaggaagtcccatttattttcaatcaagttactgaaatggtcttagagatgtccctt
5′-tgtcactttggtagctcttaacacaactacagtgaacttatgggaGGA
5′-acgtgttctcttcctagaatctggagttgtactgatgaacaattcgacgta
5′-attagggtgatttccaaaacattttcttgattaggatctaatataaactcaaaggtctcgtt
5′-atgggacttccttcttttctcccactttcattgaagatacagtaaacgttgctgtacctagagt
5′-gaccgatagcttgccgattgcagtgtGGCCACAGAGGCCTCGAGaacttcaagggacatctctaaga

[0397] PCR fragments are digested with BamHI and XhoI. Digestion products are separated on 1.5% agarose gel and C2 domain fragments are purified from the gel. The DNA fragments are ligated into the corresponding restriction sites of yeast surface display vector pYD1 (Invitrogen).

[0398] The ligation mixture is used for transformation of yeast strain EBY100. Transformants are selected by growing the cells in glucose-containing selective medium (−Trp) at 30° C.

[0399] Surface display of the C2 domain library is induced by growing the cells in galactose-containing selective medium at 20° C. Cells are rinsed with PBS and then incubated with fluorescently-labeled target protein and rinsed again in PBS.

[0400] Cells are then sorted by FACS and positive cells are regrown in glucose-containing selective medium. The cell culture may be used for a second round of sorting or may be used for isolation of plasmid DNA. Purified plasmid DNA is used as a template to PCR amplify C2 domain encoding DNA sequences.

[0401] The oligonucleotides used in this PCR reaction are (SEQ ID NOS: 224-225, respectively, in order of appearance):

5′-acactgcaatcgcgccttacggctCAGgtgCTGgtggttcccataagttcactgta
5′-gaccgatagcttgccgattgcagtCAGcacCTGaaccaccaccaccagaaccaccaccaccaacttcaa
gggacatctcta (linker sequence is underlined).

[0402] PCR fragments are then digested with AlwNI, digestion products are separated on 1.5% agarose gel and C2 domain fragments are purified from the gel. Subsequently, PCR fragments are multimerized by DNA ligation in the presence of stop fragments. The stop fragments are listed below:

Stop1 (SEQ ID NO: 226):
5′-gaattcaacgctactaccattagtagaattgatgccaccttttcagctcgcgccccaaat
gaaaaaatggtcaaactaaatctactcgttcgcagaattgggaatcaactgttacatggaatgaaacttccagac
accgtactttatgaatatttatgacgattccgagcgcgcccggactacccgtatgatgttccggattatgcccc
gggatcctcaggtgctg-3′ (digested with EcoRI and AlwNI).
Stop2 (SEQ ID NO:227):
5′-caggtgctgcactcgaggccactgcggccgcatattaacgtagatttttcctccc
aacgtcctgactggtataatgagccagttcttaaaatcgcataaccagtacatggtgattaaagttgaaattaaa
ccgtctcaagagctttgttacgttgatttgggtaatgaagctt-3′ (digested with AlwNI and
HindIII).

[0403] The ligation mixture is then digested with EcoRI and HindIII.

[0404] Multimers are separated on 1% agarose gel and DNA fragments corresponding to stop1-C2-C2-stop2 are purified from the gel. Stop1-C2-C2-stop2 fragments are PCR amplified using primers 5′ aattcaacgctactaccat-3′ (SEQ ID NO:242) and 5′-agcttcattacccaaatcaac-3′ (SEQ ID NO:243) and subsequently digested with BamHI and XhoI. Optionally, the polynucleotides encoding the multimers can be put through a further round of affinity screening (e.g., FACS analysis as described above).

[0405] Subsequently, high affinity binders are isolated and sequenced. DNA encoding the high binders is cloned into expression vector and replicated in a suitable host. Expressed proteins are purified and characterized.

### Example 7

[0406] This example describes the development of a library of trimers comprised of LDL receptor A domains.

[0407] A library of DNA sequences encoding monomeric A domains is created by assembly PCR as described in Stemmer et al., Gene 164, 49-53 (1995). The oligonucleotides used in this PCR reaction are (SEQ ID NOS: 228-235, respectively, in order of appearance):

5′-CACTATGCATGGACTCAGTGTGTCCGATAAGGGCACACGGTGCCTACCCGTATGATGTTCCGGATTATGCCCCGGGCAGTA
5′-CGCCGTCGCATMSCMAGYKCNSAGRAATACAWYGGCCGYTWYYGCACBKAAATTSGYYAGVCNSACAGGTACTGCCCGGGGCAT
5′-CGCCGTCGCATMSCMATKCCNSAGRAATACAWYGGCCGYTWYYGCACBKAAATTSGYYAGVCNSACAGGTACTGCCCGGGGCAT
5′-ATGCGACGGCGWWRATGATTGTSVAGATGGTAGCGATGAAVWGRRTTGTVMAVNMVNMVGCCVTACGGGCTCGGCCTCT
5′-ATGCGACGGCGWWCCGGATTGTSVAGATGGTAGCGATGAAVWGRRTTGTVMAVNMVNMVGCCVTACGGGCTCGGCCTCT
5′-ATGCGACGGCGWWRATGATTGTSVAGATAACAGCGATGAAVWGRRTTGTVMAVNMVNMVGCCVTACGGGCTCGGCCTCT
5′-ATGCGACGGCGWWCCGGATTGTSVAGATAACAGCGATGAAVWGRRTTGTVMAVNMVNMVGCCTACGGGCTCGGCCTCT
5′-TCCTGGTAGTACTTATCTACTACTATTTGTCTGTGTCTCTCTGGGTTCCTAACGGTTCGGCCACAGAGGCCGAGCCCGTA

[0408] where R=A/G, Y=C/T, M=A/C, K=G/T, S=C/G, W=A/T, B=C/G/T, D=A/G/T, H=A/C/T, V=A/C/G, and N=A/C/G/T.

[0409] PCR fragments are digested with XmaI and SfiI. Digestion products are separated on 3% agarose gel and A domain fragments are purified from the gel. The DNA fragments are then ligated into the corresponding restriction sites of phage display vector fuse5-HA, a derivative of fuse5. The ligation mixture is electroporated into electrocompetent E. coli cells (F-strain e.g. Top10 or MC1061). Transformed E. coli cells are grown overnight in 2×YT medium containing 20 μg/ml tetracycline.

[0410] Virions are purified from this culture by PEG-precipitation. Target protein is immobilized on solid surface (e.g. Petri dish or microtiter plate) directly by incubating in 0.1 M NaHCO₃ or indirectly via a biotin-streptavidin linkage. Purified virions are added at a typical number of ˜1-3×10¹¹ TU. The petridish or microtiter plate is incubated at 4° C., washed several times with washing buffer (TBS/Tween) and bound phages are eluted by adding glycine-HCl buffer. The eluate is neutralized by adding 1 M Tris-HCl (pH 9.1)

[0411] The phages are amplified and subsequently used as input to a second round of affinity selection. ssDNA is extracted from the final eluate using QIAprep M13 kit. ssDNA is used as a template to PCR amplify A domains encoding DNA sequences.

[0412] The oligonucleotides used in this PCR reaction are:

| | |
|---|---|
| 5′-aagcctcagcgaccgaa | (SEQ ID NO: 236) |
| 5′-agcccaataggaacccat | (SEQ ID NO: 237) |

[0413] PCR fragments are digested with AlwNI and BglI. Digestion products are separated on 3% agarose gel and A domain fragments are purified from the gel. PCR fragments are multimerized by DNA ligation in the presence of the following stop fragments:

Stop1 (SEQ ID NO: 238):
5′-gaattcaacgctactaccattagtagaattgatgccaccttttcagctcgcgccccaaatgaaaaaatggt
caaactaaatctactcgttcgcagaattgggaatcaactgttacatggaatgaaacttccagacaccgtacttta
tgaatatttatgacgattccgaggcgcgcccggactacccgtatgatgttccggattatgccccgggcggatcca
gtacctg-3′

[0414] (digested with EcoRI and ALwNI)

Stop2 (SEQ ID NO: 239):
5′-gccctacgggcctcgaggcacctggtgcggccgcatattaacgtagatttttcctcccaacgtcctgactg
gtataatgagccagttcttaaaatcgcataaccagtacatggtgattaaagttgaaattaaaccgtctcaagagc
tttgttacgttgatttgggtaatgaagctt-3′

[0415] (digested with BgII and HindIII)

[0416] The ligation mixturee is digested with EcoRI and HindIII.

[0417] Multimers are separated on 1% agarose gel and DNA fragments corresponding to stop1-A-A-A-stop2 are purified from the gel. Stop1-A-A-A-stop2 fragments are subsequently PCR amplified using primers 5′-agcttcattacccaaatcaac-3′ and 5′ aattcaacgctactaccat-3′ and subsequently digested with XmaI and SfiI. Selected polynucleotides are then cloned into a phage expression system and tested for affinity for the target protein.

[0418] High affinity binders are subsequently isolated and sequenced. DNA encoding the high binders is cloned into expression vector and subsequently expressed in a suitable host. The expressed protein is then purified and characterized.

### Example 8

[0419] This example describes the development of CD20-specific LDL receptor-based A domains.

[0420] 10¹¹ phage displaying a library of 10⁹ A-domains were added to 10⁶ Raji or Daudi cells which had been pre-blocked with 5 mg/mL casein. The mixture was incubated at 4° C. for 2 hours to allow phage to bind. Cells were washed 5 times with 1 mg/mL casein in TBS. Cells were incubated with 1 mg/mL Rituxan in TBS at 4° C. for 2 hours to elute phage specific for CD20. Cells were spun down and the supernatant used to infect E. coli BluKan cells.

[0421] Phage were propagated for 2 days at 25° C. and purified by standard methods. Panning was repeated three times, alternating selection on either Raji or Daudi cells. Thirty-two clones were picked and incubated with Raji or Daudi cells in the presence or absence of 1 mg/mL Rituxan.

[0422] Clones which showed differential binding were sequenced (Table 1) and cloned into expression vectors with SKVILF peptides fused N- and C-terminally. Protein was produced and purified according to standard methods.

[0423] Raji or Daudi cells were incubated in fresh RPMI medium supplemented with 10% FBS in the presence or absence of purified monomers for 6 hours at 37° C. Dead cells were stained with trypan blue and counted visually using a hemocytometer (FIG. 16).

TABLE 1

CD20 binding sequences

| | |
|---|---|
| 2 | CLPDEFQCRSTGICIPLAWRCDGVNDCQDDSDETNCPATGRT |
| 3 | CLPGEFRCRGTSICIPPSWVCDGVDDCGDGSDEALEHCGDSHILPFSTPGPST |
| 4 | CQPNEFPCGSTGLCVPREWLCDGVDDCQDGSDEPDCGDSHILPFSTPGPST |
| 5 | CLPGEFRCRGTSICIPPSWVCDGVDDCGDGSDEALEHCGDSHILPFSTPGPST |
| 6 | CRSGEFKCHGTRPCVPQRWVCDGDDDCVDGSDEKSCETPARR |
| 7 | CRSSQFKCHNTRPCIPGRWVCDGVNDCLDGSDEANCRRAARR |
| 8 | CLPERFQCAVPGYCIPLPGVCDGVNDCQEDSDEPNCRAPGLR |
| 9 | CRRNEFRCKSGHCVPQPLVCDGVRDCEDNSDEPSCGRPGPGATSAPAA |
| 10 | CRAGEFPCKNGQCLPVTWLCDGVNDCLDGSDEKGCGRPGPGATSAPAA |
| 11 | CPSNEFTCKSGHCVPQPFVCDGVPDCEDNSDETSCGRPGPGATSAPAA |
| 14 | CRASEFPCRGTGTCIPRHWLCDGENDCADSSDEKDCGRPGPGATSAPAA |
| 15 | CPPDEFRCKSYKRCVPLAFVCDGVDDCEDGSDEEGCGRPGPGATSAPAA |
| 1 | CLPDEFQCRSTGICIPLAWRCDGVNDCQDDSDETNCRATGRT |
| 6 | CPAGEFQCGNGQCIPATWLCDGVNDCLDNSDETGCSQDPEFHKV |
| CC3 | CPASQFKCHNTRTCIPRRWVCDGVNDCLDGSDEANCRRAAPT |

### Example 9

[0424] This example describes the development of TPO-R-specific LDL receptor-based A domains.

[0425] 10¹¹ phage displaying a library of 10⁹ A-domains were added to recombinant TPO-R, which had been coated to Immunosorp plates (Nunc) and blocked with casein. Phage were incubated with the target for 3 hours at 4° C., washed 3 times with TBS buffer, and eluted with 100 mM Glycine pH 2.2. The eluate was neutralized by addition of 2M Na₂HPO₄ and used to infect E. coli BluKan cells.

[0426] Phage were propagated at 37° C. overnight, purified by standard methods, and the selection repeated one time. After the second round of selection on immobilized TPO-R, phage were added to a suspension of TF1 cells, which had been blocked previously with casein. Cells were incubated 2 hours at 4° C., then washed 5 times with TBS.

[0427] Phage were eluted by direct addition of E. coli to the cell suspension, followed by propagation of the phage at 23° C. for 2 days. The phage were purified by standard methods, and the selection on TF1 cells was repeated one time.

[0428] The phage resulting from the second round of selection on TF1 cells was used for one round of selection on immobilized recombinant TPO-R as described above, with the exception that phage were eluted using a solution of 50 mM EDTA and 20 mM DTT. Phage clones were picked and assayed for their ability to bind both recombinant TPO-R and TF1 cells (FIG. 17), and sequenced (Table 2).

[0429] Positive clones were genetically fused to create direct homodimers, with and without insertion of a 12 amino-acid repeated Gly-Gly-Ser linker between the domains, using standard molecular biology techniques, and were cloned into an expression vector. Protein was produced and purified using standard techniques. Protein was assayed for its ability to mimic natural TPO activity in a TF1 cell proliferation assay (FIG. 18).

TABLE 2

TPO-R Binding Sequences

| | | |
|---|---|---|
| T4690 | (TPO1) | CHSTGEFRCRSSGICVSPTWVCDGENDCLDGSDEASCTAAGPT |
| T5 | (TPO2) | CPPSEFRCNSGQCIPREWRCDGDNDCADNSDEESCSAPASEPPGSLSLQ |
| T2 | (TPO9) | CLPSEFRCSSGHCIPRRWRCDGEPDCQDGSDEANCGTSEHTSLQ |
| T1 | (TPO10) | CQSNEFQCHNYNICLPRPWVCDGVNDCPDGSDEEGCSAPASEPPGSLSLQ |

### Example 10

[0430] This example describes the development of IgE-specific LDL receptor-based A domains and multimers.

[0431] 10¹¹ phage displaying a library of 10⁹ A-domains were added to human IgE, which had been immobilized on Immunosorp plates (Nunc) and blocked with casein. Soluble human IgG was added with the phage to a concentration of 5 mg/mL. Plates were incubated at 4° C. for 3 hours, then washed 3 times to remove unbound phage. Phage were eluted with a mixture of 50 mM EDTA, 20 mM DTT and used to infect E. coli. Phage were propagated at 25° C. for 2 days, and purified by standard methods.

[0432] Selection on immobilized IgE was repeated two times. Individual clones were sequenced and assayed for IgE binding affinity. A single clone, which was the major component of the selected library, was chosen for further study (Table 3).

[0433] The monomer binding epitope was mapped by measuring the number of phage bound to human IgE immobilized by one of several methods: 1) IgE directly coated to plastic, 2) IgE bound via an antibody that binds IgE at its CE2 domain, 3) IgE bound via an antibody that binds IgE at its CE3 domain, or 4) IgE bound via immobilized recombinant soluble IgE receptor. Differential frequencies of binding of the phage clones show the binding site on IgE that these phage clones recognize.

[0434] The data show that this monomer binds to CE3 and interferes with normal receptor binding (FIG. 19).

[0435] A new library was created by ligating a random domain to either the 5′ or 3′ end of the IgE binding sequence and ligating this construct into the fuse5 phage DNA. Phage were produced and purified by standard methods. Dimer phage were incubated with human IgE, which had been immobilized in 10-fold serial dilutions (from 1 μg to 10 ag per well) to an Immunosorp plate (Nunc) and blocked with casein. Soluble human IgG at 5 mg/mL was added with the phage. Wells were washed 10 times with 100 mM sodium acetate pH 5, and phage were eluted by direct addition of E. coli cells.

[0436] The phage titer eluted from each serial dilution was compared to the titer eluted from a blank well, and the lowest dilution which showed enrichment over the blank well was chosen for propagation (typically 1-10 pg per well). Phage were propagated at 25° C. for 2 days and purified by standard methods.

[0437] Phage were selected on serial dilutions 2 additional times. Individual clones were sequenced (Table 3)

TABLE 3
IGE-Binding Monomer Sequences

IGE-1
CPANEFQCRNSSTCIPRRWLCDGDDDCGDGSDETGCSAPASEPPGSLSLQ

[chemical structure]

[chemical structure]

[chemical structure]

### Example 11

[0438] This example describes the development of CD28-specific LDL receptor-based A domains and dimers by “walking.”

[0439] A library of DNA sequences encoding monomeric A domains was created by assembly PCR as described in Stemmer et al., Gene 164:49-53 (1995). The oligonucleotides used in this PCR reaction are:

5′-ATTCTCACTCGGCCGACGGTGCCTACCCGT-3′
5′-ACGGTGCCTACCCGTATGATGTTCCGGATTATGCCCCGGTCTGGAGGCGTCTGGTGGTTCGTGT-3′
5′-CGCCGTCGCAAMSCMASBBCNSTGRAABGCATNTKYYGKWAYYSYKGCATYYAAATTBGBYGRDAGVKTBACACGAACC
ACCAGA-3′
5′-CGCCGTCGCAAMSCMASBBCNSTGRAABGCAKYKGCCGYTKYYGCATYYAAATTBGBYGRDAGVKTBACACGAACCACCAGA-3′
5′-CGCCGTCGCAAMSCMASBBCNSTGRAABGCATNTKYYGKWAYYSYKGCACBKGAACTSGYYCGVCNSACA
CGAACCACCAGA-3′
5′-CGCCGTCGCAAMSCMASBBCNSTGRAABGCAKYKGCCGYTKYYGCACBKGAACTSGYYCGVCNSACACGAACCACCAGA-3′
5′-TTGCGACGGCGWWRATGATTGTSNGGACRRCTCGGATGAA-3′
5′-TTGCGACGGCGWWRATGATTGTSSGGACGGCTCGGATGAA-3′
5′-TTGCGACGGCGWWRATGATTGTSRGGACRRCTCGGATGAA-3′
5′-TTGCGACGGCGWWCCGGATTGTSNGGACRRCTCGGATGAA-3′
5′-TTGCGACGGCGWWCCGGATTGTSSGGACGGCTCGGATGAA-3′
5′-TTGCGACGGCGWWCCGGATTGTSRGGACRRCTCGGATGAA-3′
5′-AGGCCTGCAATGACGTABGCKBTKBACAGYYTKYTTCATCCGAGYYGTCC-3′
5′-AGGCCTGCAATGACGTABGTNCGGNSSYTBYACAGYYTKYTTCATCCGAGYYGTCC-3′
5′-AGGCCTGCAATGACACTTTGTGAAATTCCGGATCCTGGCTACAGYYTKYTTCATCCGAGYYGTCC-3′
5′-AGGCCTGCAATGACAGGGAACCCGGCGGTTCAGATGCTGGCGCGCTACAGYYTKYTTCATCCGAGYYGTCC-3′
5′-AGGCCTGCAATGACGCTGCCGGTGCAGAAGTCGCACCTGGGCCCGGACGACCACAGYYTKYTTCATCCGAGYYGTCC-3′
5′-AGGCCTGCAATGACGTGCTCGGACCTGGGGTGCTAAACGGCAGAATATGAGAATCACCACAGYYTKYTTCATCCGAGYYGTCC-3′
5′-AGGCCTGCAATGACGTABGCKBTKBACAMWSCKSCGVTTCATCCGAGCCGTCC-3′
5′-AGGCCTGCAATGACGTABGTNCGGNSSYTBYACAMWSCKSCGVTTCATCCGAGCCGTCC-3′
5′-AGGCCTGCAATGACACTTTGTGAAATTCCGGATCCTGGCTACAMWSCKSCGVTTCATCCGAGCCGTCC-3′
5′-AGGCCTGCAATGACAGGGAACCCGGCGGTTCAGATGCTGGCGCGCTACAMWSCKSCGVTTCATCCGAGCCGTCC-3′
5′-AGGCCTGCAATGACGCTGCCGGTGCAGAAGTCGCACCTGGGCCCGGACGACCACAMWSCKSCGVTTCATCCGAGCCGTCC-3′
5′-AGGCCTGCAATGACGTGCTCGGACCTGGGGTGCTAAACGGCAGAATATGAGAATCACCACAMWSCKSCGVTTCATCCGAGC
CGTCC-3′
5′-AGGCCTGCAATGACGTABGCKBTKBACAGDKWKCCRRCGVTTCATCCGAGYYGTCC-3′
5′-AGGCCTGCAATGACGTABGTNCGGNSSYTBYACAGDKWKCCRRCGVTTCATCCGAGYYGTCC-3′
5′-AGGCCTGCAATGACACTTTGTGAAATTCCGGATCCTGGCTACAGDKWKCCRRCGVTTCATCCGAGYYGTCC-3′
5′-AGGCCTGCAATGACAGGGAACCCGGCGGTTCAGATGCTGGCGCGCTACAGDKWKCCRRCGVTTCATCCGAGYYGTCC-3′
5′-AGGCCTGCAATGACGCTGCCGGTGCAGAAGTCGCACCTGGGCCCGGACGACCACAGDKWKCCRRCGVTTCATCCGAGYYGTCC-3′
5′-AGGCCTGCAATGACGTGCTCGGACCTGGGGTGCTAAACGGCAGAATATGAGAATCACCACAGDKWKCCRRCGVTTCATCCGAGYYG
TCC-3′
5′-TGAATTTTCTGTATGAGGTTTTGCTAAACAACTTTCAACAGTTTCGGCCCCAGAGGCCTGCAATGAC-3′

(R = A/G, Y = C/T, M = A/C, K = G/T, S = C/G, W = A/T, B = C/G/T, D = A/G/T, H = A/C/T, V = A/C/G, and N = A/C/G/T)

[0440] PCR fragments were digested with XmaI and SfiI. Digestion products were separated on 3% agarose gel and A domain fragments are purified from the gel. The DNA fragments were ligated into the corresponding restriction sites of phage display vector fuse5-HA, a derivative of fuse5 carrying an in-frame HA-epitope. The ligation mixture was electroporated into TransforMax™ EC100™ electrocompetent E. coli cells. Transformed E. coli cells were grown overnight at 37° C. in 2×YT medium containing 20 μg/ml tetracycline and 2 mM CaCl₂.

[0441] Phage particles were purified from the culture medium by PEG-precipitation. Individual wells of a 96-well microtiter plate (Maxisorp) were coated with target protein (IL-6 or CD28, 1 μg/well) in 0.1 M NaHCO₃. After blocking the wells with TBS buffer containing 10 mg/ml casein, purified phage was added at a typical number of ˜1-3×10¹¹. The microtiter plate was incubated at 4° C. for 4 hours, washed 5 times with washing buffer (TBS/Tween) and bound phages were eluted by adding glycine-HCl buffer pH 2.2. The eluate was neutralized by adding 1 M Tris-HCl (pH 9.1). The phage eluate was amplified using E. coli K91BlueKan cells and after purification used as input to a second and a third round of affinity selection (repeating the steps above).

[0442] Phage from the final eluate was used directly, without purification, as a template to PCR amplify A domain encoding DNA sequences. The oligonucleotides used in this PCR reaction are:

5′-aagcctcagcgaccgaa
5′-agcccaataggaacccat

[0443] The PCR products were purified and subsequently 50% was digested with BpmI and the other 50% with BsrDI.

[0444] The digested monomer fragments were ‘walked’ to dimers by attaching a library of naive A domain fragments using DNA ligation. Naive A domain sequences were obtained by PCR amplification of the initial A domain library (resulting from the PEG purification described above) using the A domain primers described above. The PCR fragments were purified, split into 2 equal amounts and then digested with either BpmI or BsrDI.

[0445] Digestion products were separated on a 2% agarose gel and A domain fragments were purified from the gel. The purified fragments were combined into 2 separate pools (naïve/BpmI+selected/BsrDI & naïve/BsrDI+selected/BpmI) and then ligated overnight at 16° C.

[0446] The dimeric A domain fragments were PCR amplified (5 cycles), digested with XmaI and SfiI and purified from a 2% agarose gel. Screening steps were repeated as described above except for the washing, which was done more stringently to obtain high-affinity binders. After infection, the K91BlueKan cells were plated on 2×YT agar plates containing 40 μg/ml tetracycline and grown overnight. Single colonies were picked and grown overnight in 2×YT medium containing 20 μg/ml tetracycline and 2 mM CaCl₂. Phage particles were purified from these cultures.

[0447] Binding of the individual phage clones to their target proteins was analyzed by ELISA. Clones yielding the highest ELISA signals were sequenced and subsequently recloned into a protein expression vector. Exemplary sequences are provided below:

>CD28-A1
CGPGRFQCESGQCIPATWVCDGENDCVDDSDEKSCATTAPTCLPDQFQCHDYRRCIPLGWVCDGVPDCVDNSDEA
NCEPPT
>CD28-A2
CGPGRFQCESGQCIPATWVCDGENDCVDDSDEKSCATTAPTCPPDQFTCNSGRCVPLNWLCDGVNDCADSSDEPP
ECQPRT
>CD28-A10
CGPGRFQCESGQCVPATWVCDGDDDCADGSDEKSCATTAPTCESNQFQCGSGQCLPGTWRCDGVNDCADSSDETG
CGRPGPGATSAPAACGPGRFQCNNGNCVPQTLGCDGDNDCGDSSDEANCSAPASEPPGSL
>CD28-A4
CGPGRFQCESGQCIPATWVCDGENDCVDDSDEKSCATTAPTCPANQFQCGNGRCIPPAWLCDGVNDCGDGSDESQ
LCAATGPT
>CD28-A5
CGPGRFQCESGQCIPATWVCDGENDCVDDSDEKSCATTAPTCLPNEFRCSNGQCIPPNWRCDGVDDCRDGSDEAG
CSQDPEFHKV
>CD28-A7
CGPGRFQCESGQCIPATWVCDGENDCVDDSDEKSCATTAPTCGSGQFRCSNGNCLPLRLGCDGVDDCGDSSDEPL
DPCAATVRT
>CD28-A17
CGPGRFQCESGQCIPATWVCDGENDCVDDSDEKSCATTAPTCPSGQFKCNSGRCVPPNWLCDGVNDCPDNSDEAN
CPPRT
>CD28-A19
CGPGRFQCESGQCIPATWVCDGENDCVDDSDEKSCATTAPTCQADEFQCQSSGKCLPVNWVCDGDNDCGDDSDET
NCATTGRT

[0448] Protein production was induced in the expression vectors with IPTG and purified by metal chelate affinity chromatography. CD28-specific monomers were characterized as follows.

### Biacore

[0449] Two hundred fifty RU CD28 were immobilized by NHS/EDC coupling to a CM5 chip (Biacore). 0.5 and 5 μM solutions of monomer protein were flowed over the derivatized chip, and the data were analyzed using the standard Biacore software package. See, Table 4.

TABLE 4

| CD28 | ka | kd | KD |
|---|---|---|---|
| 4 | 5.3E+03 | 3.9E−03 | 7.4E−07 |
| 5 | 1.7E+04 | 8.3E−04 | 4.8E−08 |
| 7 | 3.0E+04 | 3.2E−03 | 1.1E−07 |
| 17 | 1.4E+04 | 2.6E−03 | 1.9E−07 |
| 18 | 5.1E+02 | 2.1E−03 | 4.1E−06 |
| 19 | 1.8E+04 | 2.4E−03 | 1.3E−07 |
| 1 | 2.9E+03 | 3.9E−03 | 1.3E−06 |
| 2 | 7.4E+04 | 2.2E−03 | 3.0E−08 |
| 10 | 5.8E+04 | 1.7E−03 | 2.9E−08 |

### ELISA

[0450] Ten nanograms of CD28 per well was immobilized by hydrophobic interaction to 96-well plates (Nunc). Plates were blocked with 5 mg/mL casein. Serial dilutions of monomer protein were added to each well and incubated for 3 hours. Plates were washed to remove unbound protein and probed with α-HA-HRP to detect monomers. See, FIG. 20 and Table 5.

TABLE 5

| | Biacore | ELISA |
|---|---|---|
| 4 | 7.4E−07 | 1.4E−07 |
| 5 | 4.8E−08 | 1.0E−06 |
| 7 | 1.1E−07 | 1.2E−06 |
| 17 | 1.9E−07 | 5.4E−09 |
| 18 | 4.1E−06 | 1.0E−05 |
| 19 | 1.3E−07 | 6.3E−07 |
| 1 | 1.3E−06 | 7.8E−07 |
| 2 | 3.0E−08 | 1.6E−08 |
| 10 | 2.9E−08 | 1.7E−10 |

### PBMC Assays

[0451] Efficacy assays were performed using human and monkey PBMC as described above. CD28 results in PBMC assays:

| | | | |
|---|---|---|---|
| On human cells: | | | |
| CD28 monomer | clone 18 | IC50 = >1,000 nM | |
| | | (low activity) | |
| CD28 dimer | clone 7 | IC50 = 2 nM = 14 ng/ml | inhibition = 82% |
| CD28 trimer | clone 10 | IC50 = 3 nM = 40 ng/ml | inhibition = 81% |
| On monkey cells: | | | |
| CD28 dimer | clone 7 | IC50 = 2 nM | inhibition = 54% |
| CD28 trimer | clone 10 | IC50 = 7 nM | inhibition = 81% |

### Example 12

[0452] This example describes the development of IL6-specific LDL receptor-based A domains and dimers.

[0453] A library of DNA sequences encoding monomeric A domains was created by assembly PCR as described in Stemmer et al., Gene 164:49-53 (1995). The oligonucleotides used in this PCR reaction are:

5′-ATTCTCACTCGGCCGACGGTGCCTACCCGT-3′
5′-ACGGTGCCTACCCGTATGATGTTCCGGATTATGCCCCGGGTCTGGAGGCGTCTGGTGGTTCGTGT-3′
5′-CGCCGTCGCAAMSCMASBBCNSTGRAABGCATNTKYYGKWAYYSYKGCATYYAAATTBGBYGRDAGVKTBACACGAACC
ACCAGA-3′
5′-CGCCGTCGCAAMSCMASBBCNSTGRAABGCAKYKGCCGYTKYYGCATYYAAATTBGBYGRDAGVKTBACACGAACCACCAGA-3′
5′-CGCCGTCGCAAMSCMASBBCNSTGRAABGCATNTKYYGKWAYYSYKGCACBKGAACTSGYYCGVCNSACA
CGAACCACCAGA-3′
5′-CGCCGTCGCAAMSCMASBBCNSTGRAABGCAKYKGCCGYTKYYGCACBKGAACTSGYYCGVCNSACACGAACCACCAGA-3′
5′-TTGCGACGGCGWWRATGATTGTSNGGACRRCTCGGATGAA-3′
5′-TTGCGACGGCGWWRATGATTGTSSGGACGGCTCGGATGAA-3′
5′-TTGCGACGGCGWWRATGATTGTSRGGACRRCTCGGATGAA-3′
5′-TTGCGACGGCGWWCCGGATTGTSNGGACRRCTCGGATGAA-3′
5′-TTGCGACGGCGWWCCGGATTGTSSGGACGGCTCGGATGAA-3′
5′-TTGCGACGGCGWWCCGGATTGTSRGGACRRCTCGGATGAA-3′
5′-AGGCCTGCAATGACGTABGCKBTKBACAGYYTKYTTCATCCGAGYYGTCC-3′
5′-AGGCCTGCAATGACGTABGTNCGGNSSYTBYACAGYYTKYTTCATCCGAGYYGTCC-3′
5′-AGGCCTGCAATGACACTTTGTGAAATTCCGGATCCTGGCTACAGYYTKYTTCATCCGAGYYGTCC-3′
5′-AGGCCTGCAATGACAGGGAACCCGGCGGTTCAGATGCTGGCGCGCTACAGYYTKYTTCATCCGAGYYGTCC-3′
5′-AGGCCTGCAATGACGCTGCCGGTGCAGAAGTCGCACCTGGGCCCGGACGACCACAGYYTKYTTCATCCGAGYYGTCC-3′
5′-AGGCCTGCAATGACGTGCTCGGACCTGGGGTGCTAAACGGCAGAATATGAGAATCACCACAGYYTKYTTCATCCGAGYYGTCC-3′
5′-AGGCCTGCAATGACGTABGCKBTKBACAMWSCKSCGVTTCATCCGAGCCGTCC-3′
5′-AGGCCTGCAATGACGTABGTNCGGNSSYTBYACAMWSCKSCGVTTCATCCGAGCCGTCC-3′
5′-AGGCCTGCAATGACACTTTGTGAAATTCCGGATCCTGGCTACAMWSCKSCGVTTCATCCGAGCCGTCC-3′
5′-AGGCCTGCAATGACAGGGAACCCGGCGGTTCAGATGCTGGCGCGCTACAMWSCKSCGVTTCATCCGAGCCGTCC-3′
5′-AGGCCTGCAATGACGCTGCCGGTGCAGAAGTCGCACCTGGGCCCGGACGACCACAMWSCKSCGVTTCATCCGAGCCGTCC-3′
5′-AGGCCTGCAATGACGTGCTCGGACCTGGGGTGCTAAACGGCAGAATATGAGAATCACCACAMWSCKSCGVTTCATCCGAGC
CGTCC-3′
5′-AGGCCTGCAATGACGTABGCKBTKBACAGDKWKCCRRCGVTTCATCCGAGYYGTCC-3′
5′-AGGCCTGCAATGACGTABGTNCGGNSSYTBYACAGDKWKCCRRCGVTTCATCCGAGYYGTCC-3′
5′-AGGCCTGCAATGACACTTTGTGAAATTCCGGATCCTGGCTACAGDKWKCCRRCGVTTCATCCGAGYYGTCC-3′
5′-AGGCCTGCAATGACAGGGAACCCGGCGGTTCAGATGCTGGCGCGCTACAGDKWKCCRRCGVTTCATCCGAGYYGTCC-3′
5′-AGGCCTGCAATGACGCTGCCGGTGCAGAAGTCGCACCTGGGCCCGGACGACCACAGDKWKCCRRCGVTTCATCCGAGYYGTCC-3′
5′-AGGCCTGCAATGACGTGCTCGGACCTGGGGTGCTAAACGGCAGAATATGAGAATCACCACAGDKWKCCRRCGVTTCATCCGAGYYG
TCC-3′
5′-TGAATTTTCTGTATGAGGTTTTGCTAAACAACTTTCAACAGTTTCGGCCCCAGAGGCCTGCAATGAC-3′

(R = A/G, Y = C/T, M = A/C, K = G/T, S = C/G, W = A/T, B = C/G/T, D = A/G/T, H = A/C/T, V = A/C/G, and N = A/C/G/T)

[0454] PCR fragments were digested with XmaI and SfiI. Digestion products were separated on 3% agarose gel and A domain fragments are purified from the gel. The DNA fragments were ligated into the corresponding restriction sites of phage display vector fuse5-HA, a derivative of fuse5 carrying an in-frame HA-epitope. The ligation mixture was electroporated into TransforMax™ EC100™ electrocompetent E. coli cells. Transformed E. coli cells were grown overnight at 37° C. in 2×YT medium containing 20 μg/ml tetracycline and 2 mM CaCl₂.

[0455] Phage particles were purified from the culture medium by PEG-precipitation. Individual wells of a 96-well microtiter plate (Maxisorp) were coated with target protein (IL-6 or CD28, 1 μg/well) in 0.1 M NaHCO₃. After blocking the wells with TBS buffer containing 10 mg/ml casein purified phage was added at a typical number of ˜1-3×10¹¹. The microtiter plate was incubated at 4° C. for 4 hours, washed 5 times with washing buffer (TBS/Tween) and bound phages were eluted by adding glycine-HCl buffer pH 2.2. The eluate was neutralized by adding 1 M Tris-HCl (pH 9.1). The phage eluate was amplified using E. coli K91BlueKan cells and after purification used as input to a second and a third round of affinity selection (repeating the steps above).

[0456] Phage from the final eluate was used directly, without purification, as a template to PCR amplify A domain encoding DNA sequences. The oligonucleotides used in this PCR reaction are:

5′-aagcctcagcgaccgaa
5′-agcccaataggaacccat

[0457] The PCR products were purified and subsequently 50% was digested with BpmI and the other 50% with BsrDI.

[0458] Digestion products were separated on a 2% agarose gel and A domain monomer fragments were purified from the gel. The purified fragments were pooled and subsequently dimerized by overnight ligation at 16° C.

[0459] Clones were identified by the same methods as those described above for CD28. Identified clones included the following:

>Il6#4
CLSSQFQCKNGQCIPQTWVCDGDNDCEDDSDETGCGDSHILPFSTPGPSTCPPSQFTCRSTNTCIPAPWRCDGD
DDCEDDSDEEGCSAPASEPPGSL
>IL6#7
CLSSQFQCKNGQCIPQTWVCDGDNDCEDDSDETGCGDSHILPFSTPGPSTCRSNEFQCRSSGICIPRTWVCDGD
DDCLDNSDEKDCAART
>IL6#9
CRSDQFQCGSGHCIPQDWVCDGENDCEDGSDETDCSAPASEPPGSLCLSSQFQCKNGQCIPQTWVCDGDNDCED
DSDETGCGDSHILPFSTPGPST
>IL6#P8
CRSDQFQCGSGHCIPQDWVCDGENDCEDGSDETDCSAPASEPPGSLCRSNEFQCRSSGICIPRTWVCDGDDDCL
DNSDEKDCAART
>IL6#N7
CPPSQFTCRSTNTCIPAPWRCDGDDDCEDDSDEADCGDSHILPFSTPGPSTCLSSQFQCKNGQCIPQTWVCDGD
NDCEDDSDETGCGDSHILPFSTPGPST

### Biacore

[0460] One hundred eighty RU IL6 were immobilized by NHS/EDC coupling to a CM5 chip (Biacore). 0.1, 0.5, 1, and 5 μM solutions of monomer protein were flowed over the derivatized chip, and the data were analyzed using the standard Biacore software package. See, Table 6.

TABLE 6

| | kon (M-1s- | | |
|---|---|---|---|
| | 1) | koff(s-1) | Kd |
| IL-6 clone 9 | 3.0 × 10e4 | 7.3 × 10e−4 | 26 nM |
| IL-6 clone 4 | 4.0 × 10e3 | 2.6 × 10e−4 | 65 nM |

### Competition ELISA

[0461] IL6 receptor was biotinylated with biotin-S-S-NHS (Pierce). 2×10⁻¹⁵ mol of IL6 were immobilized by hydrophobic interaction to 96-well plates (Nunc). Plates were blocked with 5 mg/mL casein. 8×10⁻¹⁵ mol of biotinylated IL6 receptor was added to each well. Serial dilutions of monomer protein were added to each well in duplicate and incubated for 3 hours. Plates were washed to remove unbound protein and probed with either α-HA-HRP (to detect monomers) or streptavidin-HRP (to detect IL6 receptor). See, FIG. 21.

### Cell Proliferation Inhibition

[0462] TF1 cells were incubated for three days with 5 ng/mL IL6 and serial dilutions of monomer protein. Proliferation was measured by tritiated thymidine incorporation. See, FIG. 22.

### PBMC Assays

[0463] In order to assay the ex-vivo efficacy of monomers, they were tested on isolated peripheral blood lymphocytes (PBMC). These were obtained from freshly drawn, sodium-heparinized blood of healthy volunteers or cynomolgus monkeys by centrifugation on Ficoll-Hypaque (Sigma, St. Louis, Mo.) according to standard procedures. 1×10⁵ PBMC per well were stimulated either with 0.2 ug/ml of a monoclonal antibody against human CD3 (Pharmingen, San Diego, Calif.) (when using human cells) or 1 ng/ml Staphylococcus enterotoxin B (Toxin Technology, Sarasota, Fla.) (human or monkey cells) in a 96-plate in Dulbecco's Modified Eagle medium (Invitrogen) containing 10% fetal calf serum and 100 units of each penicillin and streptomycin. Monomer protein was added in varying concentrations to each culture and incubation occurred for 3 days at 37° C. in a CO₂ containing atmosphere. During the last 9 hours, cultures were pulsed with 1 uCi per well of ³H thymidine (ICN, Costa Mesa, Calif.) and the incorporation of radioactivity was measured on a Wallac Trilux Microbeta scintillation counter (Perkin Elmer, Boston, Mass.). See, FIG. 23.

[0464] While the foregoing invention has been described in some detail for purposes of clarity and understanding, it will be clear to one skilled in the art from a reading of this disclosure that various changes in form and detail can be made without departing from the true scope of the invention. For example, all the techniques, methods, compositions, apparatus and systems described above can be used in various combinations. All publications, patents, patent applications, or other documents cited in this application are incorporated by reference in their entirety for all purposes to the same extent as if each individual publication, patent, patent application, or other document were individually indicated to be incorporated by reference for all purposes.

What is claimed is:

1. A method for screening a library of monomer domains or multimers comprising monomer domains for binding affinity to multiple ligands, the method comprising
contacting a library of monomer domains or multimers of monomer domains to multiple ligands; and
selecting monomer domains or multimers that bind to at least one of the ligands.

2. The method of claim 1, comprising
i. contacting a library of monomer domains to multiple ligands;
ii. selecting monomer domains that bind to at least one of the ligands;
iii. linking the selected monomer domains to a library of monomer domains to form a library of multimers, each comprising a selected monomer domain and a second monomer domain;
iv. contacting the library of multimers to the multiple ligands to form a plurality of complexes, each complex comprising a multimer and a ligand; and
v. selecting at least one complex.

3. The method of claim 2, the method further comprising
linking the multimers of the selected complexes to a library of monomer domains or multimers to form a second library of multimers, each comprising a selected multimer and at least a third monomer domain;
contacting the second library of multimers to the multiple ligands to form a plurality of second complexes; and
selecting at least one second complex.

4. The method of claim 2, wherein the identity of the ligand and the multimer is determined.

5. The method of claim 1, wherein a library of monomer domains is contacted to multiple ligands.

6. The method of claim 1, wherein a library of multimers is contacted to multiple ligands.

7. The method of claim 1, wherein the multiple ligands are in a mixture.

8. The method of claim 1, wherein the multiple ligands are in an array.

9. The method of claim 1, wherein the multiple ligands are in or on a cell or tissue.

10. The method of claim 1, wherein the multiple ligands are immobilized on a solid support.

11. The method of claim 1, wherein the ligands are polypeptides.

12. The method of claim 12, wherein the polypeptides are expressed on the surface of phage.

13. The method of claim 1, wherein the monomer domain or multimer library is expressed on the surface of phage.

14. The method of claim 1, wherein the monomer domain is a LDL receptor type A monomer domain.

15. The method of claim 1, wherein the monomer domain is an EGF monomer domain.

16. The method of claim 1, wherein the library of multimers is expressed on the surface of phage to form library-expressing phage and the ligands are expressed on the surface of phage to form ligand-expressing phage, and the method comprises
contacting library-expressing phage to the ligand-expressing phage to form ligand-expressing phage/library-expressing phage pairs;
removing ligand-expressing phage that do not bind to library-expressing or removing library-expressing phage that do not bind to ligand-expressing phage; and
selecting the ligand-expressing phage/library-expressing phage pairs.

17. The method of claim 16, further comprising isolating polynucleotides from the phage pairs and amplifying the polynucleotides to produce a polynucleotide hybrid comprising polynucleotides from the ligand-expressing phage and the library-expressing phage.

18. The method of claim 17, comprising isolating polynucleotide hybrids from a plurality of phage pairs, thereby forming a mixture of polynucleotide hybrids.

19. The method of claim 18, comprising
contacting the mixture of hybrid polynucleotides to a cDNA library under conditions to allow for polynucleotide hybridization, thereby hybridizing a hybrid polynucleotide to a cDNA in the cDNA library; and
determining the nucleotide sequence of the hybridized hybrid polynucleotide, thereby identifying a monomer domain that specifically binds to the polypeptide encoded by the cDNA.

20. The method of claim 1, wherein the monomer domain library is expressed on the surface of phage to form library-expressing phage and the ligands are expressed on the surface of phage to form ligand-expressing phage, and the selected complexes comprise a library-expressing phage bound to a ligand-expressing phage and the method comprises:
dividing the selected monomer domains or multimers into a first and a second portion,
linking the monomer domains or multimers of the first portion to a solid surface and contacting a phage-displayed ligand library to the monomer domains or multimers of the first portion to identify target ligand phage that binds to a monomer domain or multimer of the first portion;
infecting phage displaying the monomer domains or multimers of the second portion into bacteria to express the phage; and
contacting the target ligand phage to the expressed phage to form phage pairs comprised of a target ligand phage and a phage displaying a monomer domain or multimer.

21. The method of claim 20, further comprising isolating a polynucleotide from each phage of the phage pair, thereby identifying a multimer or monomer domain that binds to the ligand in the phage pair.

22. The method of claim 23, further comprising amplifying the polynucleotides to produce a polynucleotide hybrid comprising polynucleotides from the target ligand phage and the library phage.

23. The method of claim 20, comprising isolating and amplifying polynucleotide hybrids from a plurality of phage pairs, thereby forming a mixture of polynucleotide hybrids.

24. The method of claim 23, comprising
contacting the mixture of hybrid polynucleotides to a cDNA library under conditions to allow for hybridization, thereby hybridizing a hybrid polynucleotide to a cDNA in the cDNA library; and
determining the nucleotide sequence of the associated hybrid polynucleotide, thereby identifying a monomer domain that specifically binds to the ligand encoded by the cDNA associated cDNA.

The application's sequence listing, which the Patent Office published only in electronic form, follows.

SEQUENCE LISTING (511 sequences)

SEQ ID NO: 1 - protein, 37 aa, Artificial Sequence
  human IDD A domain
CNPGQFACRSGTIQCIPLPWQCDGWATCEDESDEANC

SEQ ID NO: 2 - protein, 35 aa, Artificial Sequence
  human low-density lipoprotein receptor (LDLR) related protein 3 (LRP3) A domain
CQADEFRCDNGKCLPGPWQCNTVDECGDGSDEGNC

SEQ ID NO: 3 - protein, 38 aa, Artificial Sequence
  human low-density lipoprotein receptor (LDLR) related protein 3 (LRP3) A domain
CPGGTFPCSGARSTRCLPVERRCDGLQDCGDGSDEAGC

SEQ ID NO: 4 - protein, 46 aa, Artificial Sequence
  human low-density lipoprotein receptor (LDLR) related protein 3 (LRP3) A domain
CLPWEQPCGSSSDSDGGSLGDQGCFSEPQRCDGWWHCASGRDEQGC

SEQ ID NO: 5 - protein, 37 aa, Artificial Sequence
  human low-density lipoprotein receptor (LDLR) related protein 3 (LRP3) A domain
CPPDQYPCEGGSGLCYTPADRCNNQKSCPDGADEKNC

SEQ ID NO: 6 - protein, 35 aa, Artificial Sequence
  human low-density lipoprotein receptor (LDLR) related protein 3 (LRP3) A domain
CQPGTFHCGTNLCIFETWRCDGQEDCQDGSDEHGC

SEQ ID NO: 7 - protein, 37 aa, Artificial Sequence
  human low-density lipoprotein receptor (LDLR) related protein 5 (LRP5) A domain
CSPDQFACATGEIDCIPGAWRCDGFPECDDQSDEEGC

SEQ ID NO: 8 - protein, 35 aa, Artificial Sequence
  human low-density lipoprotein receptor (LDLR) related protein 5 (LRP5) A domain
CSAAQFPCARGQCVDLRLRCDGEADCQDRSDEVDC

SEQ ID NO: 9 - protein, 35 aa, Artificial Sequence
  human low-density lipoprotein receptor (LDLR) related protein 5 (LRP5) A domain
CLPNQFRCASGQCVLIKQQCDSFPDCIDGSDELMC

SEQ ID NO: 10 - protein, 37 aa, Artificial Sequence
  human low-density lipoprotein receptor (LDLR) related protein 6 (LRP6) A domain
CSPQQFTCFTGEIDCIPVAWRCDGFTECEDHSDELNC

SEQ ID NO: 11 - protein, 35 aa, Artificial Sequence
  human low-density lipoprotein receptor (LDLR) related protein 6 (LRP6) A domain
CSESQFQCASGQCIDGALRCNGDANCQDKSDEKNC

SEQ ID NO: 12 - protein, 35 aa, Artificial Sequence
  human low-density lipoprotein receptor (LDLR) related protein 6 (LRP6) A domain
CLIDQFRCANGQCIGKHKKCDHNVDCSDKSDELDC

SEQ ID NO: 13 - protein, 35 aa, Artificial Sequence
  human ST7 A domain
CACDQFRCGNGKCIPEAWKCNNMDECGDSSDEEIC

SEQ ID NO: 14 - protein, 40 aa, Artificial Sequence
  human ST7 A domain
CAYNQFQCLSRFTKVYTCLPESLKCDGNIDCLDLGDEIDC

SEQ ID NO: 15 - protein, 36 aa, Artificial Sequence
  human ST7 A domain
CLPWEIPCGGNWGCYTEQQRCDGYWHCPNGRDETNC

SEQ ID NO: 16 - protein, 36 aa, Artificial Sequence
  human ST7 A domain
CQKEEFPCSRNGVCYPRSDRCNYQNHCPNGSDEKNC

SEQ ID NO: 17 - protein, 35 aa, Artificial Sequence
  human ST7 A domain
CQPGNFHCKNNRCVFESWVCDSQDDCGDGSDEENC

SEQ ID NO: 18 - protein, 36 aa, Artificial Sequence
  human CORI A domain
CGRGENFLCASGICIPGKLQCNGYNDCDDWSDEAHC

SEQ ID NO: 19 - protein, 35 aa, Artificial Sequence
  human CORI A domain
CSENLFHCHTGKCLNYSLVCDGYDDCGDLSDEQNC

SEQ ID NO: 20 - protein, 36 aa, Artificial Sequence
  human CORI A domain
CNPTTEHRCGDGRCIAMEWVCDGDHDCVDKSDEVNC

SEQ ID NO: 21 - protein, 36 aa, Artificial Sequence
  human CORI A domain
CHSQGLVECRNGQCIPSTFQCDGDEDCKDGSDEENC

SEQ ID NO: 22 - protein, 35 aa, Artificial Sequence
  human CORI A domain
CSPSHFKCRSGQCVLASRRCDGQADCDDDSDEENC

SEQ ID NO: 23 - protein, 37 aa, Artificial Sequence
  human CORI A domain
CKERDLWECPSNKQCLKHTVICDGFPDCPDYMDEKNC

SEQ ID NO: 24 - protein, 35 aa, Artificial Sequence
  human CORI A domain
CQDDELECANHACVSRDLWCDGEADCSDSSDEWDC

SEQ ID NO: 25 - protein, 36 aa, Artificial Sequence
  human TMS2 A domain
CSNSGIECDSSGTCINPSNWCDGVSHCPGGEDENRC

SEQ ID NO: 26 - protein, 35 aa, Artificial Sequence
  human TMS3 A domain
CSGKYRCRSSFKCIELIARCDGVSDCKDGEDEYRC

SEQ ID NO: 27 - protein, 34 aa, Artificial Sequence
  human MAT A domain
CPGQFTCRTGRCIRKELRCDGWADCTDHSDELNC

SEQ ID NO: 28 - protein, 36 aa, Artificial Sequence
  human MAT A domain
CDAGHQFTCKNKFCKPLFWVCDSVNDCGDNSDEQGC

SEQ ID NO: 29 - protein, 35 aa, Artificial Sequence
  human MAT A domain
CPAQTFRCSNGKCLSKSQQCNGKDDCGDGSDEASC

SEQ ID NO: 30 - protein, 36 aa, Artificial Sequence
  human MAT A domain
CTKHTYRCLNGLCLSKGNPECDGKEDCSDGSDEKDC

SEQ ID NO: 31 - protein, 38 aa, Artificial Sequence
  human ENTK A domain
CLPGSSPCTDALTCIKADLFCDGEVNCPDGSDEDNKMC

SEQ ID NO: 32 - protein, 35 aa, Artificial Sequence
  human ENTK A domain
CKADHFQCKNGECVPLVNLCDGHLHCEDGSDEADC

SEQ ID NO: 33 - protein, 35 aa, Artificial Sequence
  human HAI1 A domain
CQPTQFRCSNGCCIDSFLECDDTPNCPDASDEAAC

SEQ ID NO: 34 - protein, 42 aa, Artificial Sequence
  human CFAI A domain
CYTQKADSPMDDFFQCVNGKYISQMKACDGINDCGDQSDELC

SEQ ID NO: 35 - protein, 35 aa, Artificial Sequence
  human CFAI A domain
CQGKGFHCKSGVCIPSQYQCNGEVDCITGEDEVGC

SEQ ID NO: 36 - protein, 34 aa, Artificial Sequence
  human CO6 A domain
CKNKFRCDSGRCIARKLECNGENDCGDNSDERDC

SEQ ID NO: 37 - protein, 35 aa, Artificial Sequence
  human CO7 A domain
CGERFRCFSGQCISKSLVCNGDSDCDEDSADEDRC

SEQ ID NO: 38 - protein, 35 aa, Artificial Sequence
  human CO8A A domain
CGQDFQCKETGRCLKRHLVCNGDQDCLDGSDEDDC

SEQ ID NO: 39 - protein, 34 aa, Artificial Sequence
  human CO8B A domain
CEGFVCAQTGRCVNRRLLCNGDNDCGDQSDEANC

SEQ ID NO: 40 - protein, 34 aa, Artificial Sequence
  human CO9 A domain
CGNDFQCSTGRCIKMRLRCNGDNDCGDFSDEDDC

SEQ ID NO: 41 - protein, 36 aa, Artificial Sequence
  human PERL A domain
CTEAEFACHSYNECVALEYRCDRRPDCRDMSDELNC

SEQ ID NO: 42 - protein, 35 aa, Artificial Sequence
  human PERL A domain
CGPQEAACRNGHCIPRDYLCDGQEDCEDGSDELDC

SEQ ID NO: 43 - protein, 35 aa, Artificial Sequence
  human PERL A domain
CEPNEFPCGNGHCALKLWRCDGDFDCEDRTDEANC

SEQ ID NO: 44 - protein, 36 aa, Artificial Sequence
  human PERL A domain
CGPTQFRCVSTNMCIPASFHCDEESDCPDRSDEFGC

SEQ ID NO: 45 - protein, 35 aa, Artificial Sequence
  human SORL A domain
CLRNQYRCSNGNCINSIWWCDFDNDCGDMSDERNC

SEQ ID NO: 46 - protein, 37 aa, Artificial Sequence
  human SORL A domain
CDLDTQFRCQESGTCIPLSYKCDLEDDCGDNSDESHC

SEQ ID NO: 47 - protein, 35 aa, Artificial Sequence
  human SORL A domain
CRSDEYNCSSGMCIRSSWVCDGDNDCRDWSDEANC

SEQ ID NO: 48 - protein, 37 aa, Artificial Sequence
  human SORL A domain
CEASNFQCRNGHCIPQRWACDGDTDCQDGSDEDPVNC

SEQ ID NO: 49 - protein, 33 aa, Artificial Sequence
  human SORL A domain
CNGFRCPNGTCIPSSKHCDGLRDCSDGSDEQHC

SEQ ID NO: 50 - protein, 41 aa, Artificial Sequence
  human SORL A domain
CTHFMDFVCKNRQQCLFHSMVCDGIIQCRDGSDEDAAFAGC

SEQ ID NO: 51 - protein, 35 aa, Artificial Sequence
  human SORL A domain
CDEFGFQCQNGVCISLIWKCDGMDDCGDYSDEANC

SEQ ID NO: 52 - protein, 36 aa, Artificial Sequence
  human SORL A domain
CSRYFQFRCENGHCIPNRWKCDRENDCGDWSDEKDC

SEQ ID NO: 53 - protein, 35 aa, Artificial Sequence
  human SORL A domain
CLPNYYRCSSGTCVMDTWVCDGYRDCADGSDEEAC

SEQ ID NO: 54 - protein, 36 aa, Artificial Sequence
  human SORL A domain
CDRFEFECHQPKTCIPNWKRCDGHQDCQDGRDEANC

SEQ ID NO: 55 - protein, 36 aa, Artificial Sequence
  human SORL A domain
CMSREFQCEDGEACIVLSERCDGFLDCSDESDEKAC

SEQ ID NO: 56 - protein, 35 aa, Artificial Sequence
  human ApoER2 A domain
CEKDQFQCRNERCIPSVWRCDEDDDCLDHSDEDDC

SEQ ID NO: 57 - protein, 37 aa, Artificial Sequence
  human ApoER2 A domain
CADSDFTCDNGHCIHERWKCDGEEECPDGSDESEATC

SEQ ID NO: 58 - protein, 37 aa, Artificial Sequence
  human ApoER2 A domain
CPAEKLSCGPTSHKCVPASWRCDGEKDCEGGADEAGC

SEQ ID NO: 59 - protein, 35 aa, Artificial Sequence
  human ApoER2 A domain
CAPHEFQCGNRSCLAAVFVCDGDDDCGDGSDERGC

SEQ ID NO: 60 - protein, 40 aa, Artificial Sequence
  human ApoER2 A domain
CGPREFRCGGDGGGACIPERWVCDRQFDCEDRSDEAAELC

SEQ ID NO: 61 - protein, 36 aa, Artificial Sequence
  human ApoER2 A domain
CATVSQFACRSGECVHLGWRCDGDRDCKDKSDEADC

SEQ ID NO: 62 - protein, 35 aa, Artificial Sequence
  human ApoER2 A domain
CRGDEFQCGDGTCVLAIKHCNQEQDCPDGSDEAGC

SEQ ID NO: 63 - protein, 37 aa, Artificial Sequence
  human low-density lipoprotein receptor (LDLR) A domain
CERNEFQCQDGKCISYKWVCDGSAECQDGSDESQETC

SEQ ID NO: 64 - protein, 37 aa, Artificial Sequence
  human low-density lipoprotein receptor (LDLR) A domain
CKSGDFSCGGRVNRCIPQFWRCDGQVDCDNGSDEQGC

SEQ ID NO: 65 - protein, 35 aa, Artificial Sequence
  human low-density lipoprotein receptor (LDLR) A domain
CSQDEFRCHDGKCISRQFVCDSDRDCLDGSDEASC

SEQ ID NO: 66 - protein, 37 aa, Artificial Sequence
  human low-density lipoprotein receptor (LDLR) A domain
CGPASFQCNSSTCIPQLWACDNDPDCEDGSDEWPQRC

SEQ ID NO: 67 - protein, 35 aa, Artificial Sequence
  human low-density lipoprotein receptor (LDLR) A domain
CSAFEFHCLSGECIHSSWRCDGGPDCKDKSDEENC

SEQ ID NO: 68 - protein, 35 aa, Artificial Sequence
  human low-density lipoprotein receptor (LDLR) A domain
CRPDEFQCSDGNCIHGSRQCDREYDCKDMSDEVGC

SEQ ID NO: 69 - protein, 38 aa, Artificial Sequence
  human low-density lipoprotein receptor (LDLR) A domain
CEGPNKFKCHSGECITLDKVCNMARDCRDWSDEPIKEC

SEQ ID NO: 70 - protein, 35 aa, Artificial Sequence
  human LDVR A domain
CEPSQFQCTNGRCITLLWKCDGDEDCVDGSDEKNC

SEQ ID NO: 71 - protein, 37 aa, Artificial Sequence
  human LDVR A domain
CAESDFVCNNGQCVPSRWKCDGDPDCEDGSDESPEQC

SEQ ID NO: 72 - protein, 37 aa, Artificial Sequence
  human LDVR A domain
CRIHEISCGAHSTQCIPVSWRCDGENDCDSGEDEENC

SEQ ID NO: 73 - protein, 35 aa, Artificial Sequence
  human LDVR A domain
CSPDEFTCSSGRCISRNFVCNGQDDCSDGSDELDC

SEQ ID NO: 74 - protein, 37 aa, Artificial Sequence
  human LDVR A domain
CGAHEFQCSTSSCIPISWVCDDDADCSDQSDESLEQC

SEQ ID NO: 75 - protein, 35 aa, Artificial Sequence
  human LDVR A domain
CPASEIQCGSGECIHKKWRCDGDPDCKDGSDEVNC

SEQ ID NO: 76 - protein, 35 aa, Artificial Sequence
  human LDVR A domain
CRPDQFECEDGSCIHGSRQCNGIRDCVDGSDEVNC

SEQ ID NO: 77 - protein, 38 aa, Artificial Sequence
  human LDVR A domain
CLGPGKFKCRSGECIDISKVCNQEQDCRDWSDEPLKEC

SEQ ID NO: 78 - protein, 38 aa, Artificial Sequence
  human low-density lipoprotein receptor (LDLR) related protein 1 (LRP1) A domain
CSPKQFACRDQITCISKGWRCDGERDCPDGSDEAPEIC

SEQ ID NO: 79 - protein, 37 aa, Artificial Sequence
  human low-density lipoprotein receptor (LDLR) related protein 1 (LRP1) A domain
CQPNEHNCLGTELCVPMSRLCNGVQDCMDGSDEGPHC

SEQ ID NO: 80 - protein, 37 aa, Artificial Sequence
  human low-density lipoprotein receptor (LDLR) related protein 1 (LRP1) A domain
CQPGEFACANSRCIQERWKCDGDNDCLDNSDEAPALC

SEQ ID NO: 81 - protein, 37 aa, Artificial Sequence
  human low-density lipoprotein receptor (LDLR) related protein 1 (LRP1) A domain
CPSDRFKCENNRCIPNRWLCDGDNDCGNSEDESNATC

SEQ ID NO: 82 - protein, 36 aa, Artificial Sequence
  human low-density lipoprotein receptor (LDLR) related protein 1 (LRP1) A domain
CPPNQFSCASGRCIPISWTCDLDDDCGDRSDESASC

SEQ ID NO: 83 - protein, 36 aa, Artificial Sequence
  human low-density lipoprotein receptor (LDLR) related protein 1 (LRP1) A domain
CFPLTQFTCNNGRCININWRCDNDNDCGDNSDEAGC

SEQ ID NO: 84 - protein, 37 aa, Artificial Sequence
  human low-density lipoprotein receptor (LDLR) related protein 1 (LRP1) A domain
CSSTQFKCNSGRCIPEHWTCDGDNDCGDYSDETHANC

SEQ ID NO: 85 - protein, 36 aa, Artificial Sequence
  human low-density lipoprotein receptor (LDLR) related protein 1 (LRP1) A domain
CHTDEFQCRLDGLCIPLRWRCDGDTDCMDSSDEKSC

SEQ ID NO: 86 - protein, 37 aa, Artificial Sequence
  human low-density lipoprotein receptor (LDLR) related protein 1 (LRP1) A domain
CDPSVKFGCKDSARCISKAWVCDGDNDCEDNSDEENC

SEQ ID NO: 87 - protein, 38 aa, Artificial Sequence
  human low-density lipoprotein receptor (LDLR) related protein 1 (LRP1) A domain
CRPPSHPCANNTSVCLPPDKLCDGNDDCGDGSDEGELC

SEQ ID NO: 88 - protein, 38 aa, Artificial Sequence
  human low-density lipoprotein receptor (LDLR) related protein 1 (LRP1) A domain
CRAQDEFECANGECINFSLTCDGVPHCKDKSDEKPSYC

SEQ ID NO: 89 - protein, 35 aa, Artificial Sequence
  human low-density lipoprotein receptor (LDLR) related protein 1 (LRP1) A domain
CKKTFRQCSNGRCVSNMLWCNGADDCGDGSDEIPC

SEQ ID NO: 90 - protein, 35 aa, Artificial Sequence
  human low-density lipoprotein receptor (LDLR) related protein 1 (LRP1) A domain
CGVGEFRCRDGTCIGNSSRCNQFVDCEDASDEMNC

SEQ ID NO: 91 - protein, 45 aa, Artificial Sequence
  human low-density lipoprotein receptor (LDLR) related protein 1 (LRP1) A domain
CSSYFRLGVKGVLFQPCERTSLCYAPSWVCDGANDCGDYSDERDC

SEQ ID NO: 92 - protein, 35 aa, Artificial Sequence
  human low-density lipoprotein receptor (LDLR) related protein 1 (LRP1) A domain
CPLNYFACPSGRCIPMSWTCDKEDDCEHGEDETHC

SEQ ID NO: 93 - protein, 36 aa, Artificial Sequence
  human low-density lipoprotein receptor (LDLR) related protein 1 (LRP1) A domain
CSEAQFECQNHRCISKQWLCDGSDDCGDGSDEAAHC

SEQ ID NO: 94 - protein, 39 aa, Artificial Sequence
  human low-density lipoprotein receptor (LDLR) related protein 1 (LRP1) A domain
CGPSSFSCPGTHVCVPERWLCDGDKDCADGADESIAAGC

SEQ ID NO: 95 - protein, 36 aa, Artificial Sequence
  human low-density lipoprotein receptor (LDLR) related protein 1 (LRP1) A domain
CDDREFMCQNRQCIPKHFVCDHDRDCADGSDESPEC

SEQ ID NO: 96 - protein, 40 aa, Artificial Sequence
  human low-density lipoprotein receptor (LDLR) related protein 1 (LRP1) A domain
CGPSEFRCANGRCLSSRQWECDGENDCHDQSDEAPKNPHC

SEQ ID NO: 97 - protein, 36 aa, Artificial Sequence
  human low-density lipoprotein receptor (LDLR) related protein 1 (LRP1) A domain
CNASSQFLCSSGRCVAEALLCNGQDDCGDSSDERGC

SEQ ID NO: 98 - protein, 36 aa, Artificial Sequence
  human low-density lipoprotein receptor (LDLR) related protein 1 (LRP1) A domain
CTASQFVCKNDKCIPFWWKCDTEDDCGDHSDEPPDC

SEQ ID NO: 99 - protein, 35 aa, Artificial Sequence
  human low-density lipoprotein receptor (LDLR) related protein 1 (LRP1) A domain
CRPGQFQCSTGICTNPAFICDGDNDCQDNSDEANC

SEQ ID NO: 100 - protein, 36 aa, Artificial Sequence
  human low-density lipoprotein receptor (LDLR) related protein 1 (LRP1) A domain
CLPSQFKCTNTNRCIPGIFRCNGQDNCGDGEDERDC

SEQ ID NO: 101 - protein, 37 aa, Artificial Sequence
  human low-density lipoprotein receptor (LDLR) related protein 1 (LRP1) A domain
CAPNQFQCSITKRCIPRVWVCDRDNDCVDGSDEPANC

SEQ ID NO: 102 - protein, 38 aa, Artificial Sequence
  human low-density lipoprotein receptor (LDLR) related protein 1 (LRP1) A domain
CGVDEFRCKDSGRCIPARWKCDGEDDCGDGSDEPKEEC

SEQ ID NO: 103 - protein, 35 aa, Artificial Sequence
  human low-density lipoprotein receptor (LDLR) related protein 1 (LRP1) A domain
CEPYQFRCKNNRCVPGRWQCDYDNDCGDNSDEESC

SEQ ID NO: 104 - protein, 35 aa, Artificial Sequence
  human low-density lipoprotein receptor (LDLR) related protein 1 (LRP1) A domain
CSESEFSCANGRCIAGRWKCDGDHDCADGSDEKDC

SEQ ID NO: 105 - protein, 35 aa, Artificial Sequence
  human low-density lipoprotein receptor (LDLR) related protein 1 (LRP1) A domain
CDMDQFQCKSGHCIPLRWRCDADADCMDGSDEEAC

SEQ ID NO: 106 - protein, 37 aa, Artificial Sequence
  human low-density lipoprotein receptor (LDLR) related protein 1 (LRP1) A domain
CPLDEFQCNNTLCKPLAWKCDGEDDCGDNSDENPEEC

SEQ ID NO: 107 - protein, 37 aa, Artificial Sequence
  human low-density lipoprotein receptor (LDLR) related protein 1 (LRP1) A domain
CPPNRPFRCKNDRVCLWIGRQCDGTDNCGDGTDEEDC

SEQ ID NO: 108 - protein, 36 aa, Artificial Sequence
  human low-density lipoprotein receptor (LDLR) related protein 1 (LRP1) A domain
CKDKKEFLCRNQRCLSSSLRCNMFDDCGDGSDEEDC

SEQ ID NO: 109 - protein, 35 aa, Artificial Sequence
  human low-density lipoprotein receptor (LDLR) related protein 2 (LRP2) A domain
CDSAHFRCGSGHCIPADWRCDGTKDCSDDADEIGC

SEQ ID NO: 110 - protein, 37 aa, Artificial Sequence
  human low-density lipoprotein receptor (LDLR) related protein 2 (LRP2) A domain
CQQGYFKCQSEGQCIPSSWVCDQDQDCDDGSDERQDC

SEQ ID NO: 111 - protein, 35 aa, Artificial Sequence
  human low-density lipoprotein receptor (LDLR) related protein 2 (LRP2) A domain
CSSHQITCSNGQCIPSEYRCDHVRDCPDGADENDC

SEQ ID NO: 112 - protein, 33 aa, Artificial Sequence
  human low-density lipoprotein receptor (LDLR) related protein 2 (LRP2) A domain
CEQLTCDNGACYNTSQKCDWKVDCRDSSDEINC

SEQ ID NO: 113 - protein, 35 aa, Artificial Sequence
  human low-density lipoprotein receptor (LDLR) related protein 2 (LRP2) A domain
CLHNEFSCGNGECIPRAYVCDHDNDCQDGSDEHAC

SEQ ID NO: 114 - protein, 35 aa, Artificial Sequence
  human low-density lipoprotein receptor (LDLR) related protein 2 (LRP2) A domain
CGGYQFTCPSGRCIYQNWVCDGEDDCKDNGDEDGC

SEQ ID NO: 115 - protein, 42 aa, Artificial Sequence
  human low-density lipoprotein receptor (LDLR) related protein 2 (LRP2) A domain
CSPREWSCPESGRCISIYKVCDGILDCPGREDENNTSTGKYC

SEQ ID NO: 116 - protein, 35 aa, Artificial Sequence
  human low-density lipoprotein receptor (LDLR) related protein 2 (LRP2) A domain
CGLFSFPCKNGRCVPNYYLCDGVDDCHDNSDEQLC

SEQ ID NO: 117 - protein, 35 aa, Artificial Sequence
  human low-density lipoprotein receptor (LDLR) related protein 2 (LRP2) A domain
CSSSAFTCGHGECIPAHWRCDKRNDCVDGSDEHNC

SEQ ID NO: 118 - protein, 35 aa, Artificial Sequence
  human low-density lipoprotein receptor (LDLR) related protein 2 (LRP2) A domain
CLDTQYTCDNHQCISKNWVCDTDNDCGDGSDEKNC

SEQ ID NO: 119 - protein, 35 aa, Artificial Sequence
  human low-density lipoprotein receptor (LDLR) related protein 2 (LRP2) A domain
CQPSQFNCPNHRCIDLSFVCDGDKDCVDGSDEVGC

SEQ ID NO: 120 - protein, 36 aa, Artificial Sequence
  human low-density lipoprotein receptor (LDLR) related protein 2 (LRP2) A domain
CTASQFKCASGDKCIGVTNRCDGVFDCSDNSDEAGC

SEQ ID NO: 121 - protein, 37 aa, Artificial Sequence
  human low-density lipoprotein receptor (LDLR) related protein 2 (LRP2) A domain
CHSDEFQCQEDGICIPNFWECDGHPDCLYGSDEHNAC

SEQ ID NO: 122 - protein, 35 aa, Artificial Sequence
  human low-density lipoprotein receptor (LDLR) related protein 2 (LRP2) A domain
CPSSYFHCDNGNCIHRAWLCDRDNDCGDMSDEKDC

SEQ ID NO: 123 - protein, 37 aa, Artificial Sequence
  human low-density lipoprotein receptor (LDLR) related protein 2 (LRP2) A domain
CPSWQWQCLGHNICVNLSVVCDGIFDCPNGTDESPLC

SEQ ID NO: 124 - protein, 37 aa, Artificial Sequence
  human low-density lipoprotein receptor (LDLR) related protein 2 (LRP2) A domain
CGASSFTCSNGRCISEEWKCDNDNDCGDGSDEMESVC

SEQ ID NO: 125 - protein, 35 aa, Artificial Sequence
  human low-density lipoprotein receptor (LDLR) related protein 2 (LRP2) A domain
CSPTAFTCANGRCVQYSYRCDYYNDCGDGSDEAGC

SEQ ID NO: 126 - protein, 38 aa, Artificial Sequence
  human low-density lipoprotein receptor (LDLR) related protein 2 (LRP2) A domain
CNATTEFMCNNRRCIPREFICNGVDNCHDNNTSDEKNC

SEQ ID NO: 127 - protein, 38 aa, Artificial Sequence
  human low-density lipoprotein receptor (LDLR) related protein 2 (LRP2) A domain
CQSGYTKCHNSNICIPRVYLCDGDNDCGDNSDENPTYC

SEQ ID NO: 128 - protein, 36 aa, Artificial Sequence
  human low-density lipoprotein receptor (LDLR) related protein 2 (LRP2) A domain
CSSSEFQCASGRCIPQHWYCDQETDCFDASDEPASC

SEQ ID NO: 129 - protein, 38 aa, Artificial Sequence
  human low-density lipoprotein receptor (LDLR) related protein 2 (LRP2) A domain
CLADEFKCDGGRCIPSEWICDGDNDCGDMSDEDKRHQC

SEQ ID NO: 130 - protein, 41 aa, Artificial Sequence
  human low-density lipoprotein receptor (LDLR) related protein 2 (LRP2) A domain
CSDSEFLCVNDRPPDRRCIPQSWVCDGDVDCTDGYDENQNC

SEQ ID NO: 131 - protein, 35 aa, Artificial Sequence
  human low-density lipoprotein receptor (LDLR) related protein 2 (LRP2) A domain
CSENEFTCGYGLCIPKIFRCDRHNDCGDYSDERGC

SEQ ID NO: 132 - protein, 37 aa, Artificial Sequence
  human low-density lipoprotein receptor (LDLR) related protein 2 (LRP2) A domain
CQQNQFTCQNGRCISKTFVCDEDNDCGDGSDELMHLC

SEQ ID NO: 133 - protein, 35 aa, Artificial Sequence
  human low-density lipoprotein receptor (LDLR) related protein 2 (LRP2) A domain
CPPHEFKCDNGRCIEMMKLCNHLDDCLDNSDEKGC

SEQ ID NO: 134 - protein, 37 aa, Artificial Sequence
  human low-density lipoprotein receptor (LDLR) related protein 2 (LRP2) A domain
CSSTQFLCANNEKCIPIWWKCDGQKDCSDGSDELALC

SEQ ID NO: 135 - protein, 37 aa, Artificial Sequence
  human low-density lipoprotein receptor (LDLR) related protein 2 (LRP2) A domain
CRLGQFQCSDGNCTSPQTLCNAHQNCPDGSDEDRLLC

SEQ ID NO: 136 - protein, 37 aa, Artificial Sequence
  human low-density lipoprotein receptor (LDLR) related protein 2 (LRP2) A domain
CDSNEWQCANKRCIPESWQCDTFNDCEDNSDEDSSHC

SEQ ID NO: 137 - protein, 37 aa, Artificial Sequence
  human low-density lipoprotein receptor (LDLR) related protein 2 (LRP2) A domain
CRPGQFRCANGRCIPQAWKCDVDNDCGDHSDEPIEEC

SEQ ID NO: 138 - protein, 37 aa, Artificial Sequence
  human low-density lipoprotein receptor (LDLR) related protein 2 (LRP2) A domain
CDNFTEFSCKTNYRCIPKWAVCNGVDDCRDNSDEQGC

SEQ ID NO: 139 - protein, 36 aa, Artificial Sequence
  human low-density lipoprotein receptor (LDLR) related protein 2 (LRP2) A domain
CHPVGDFRCKNHHCIPLRWQCDGQNDCGDNSDEENC

SEQ ID NO: 140 - protein, 35 aa, Artificial Sequence
  human low-density lipoprotein receptor (LDLR) related protein 2 (LRP2) A domain
CTESEFRCVNQQCIPSRWICDHYNDCGDNSDERDC

SEQ ID NO: 141 - protein, 35 aa, Artificial Sequence
  human low-density lipoprotein receptor (LDLR) related protein 2 (LRP2) A domain
CHPEYFQCTSGHCVHSELKCDGSADCLDASDEADC

SEQ ID NO: 142 - protein, 37 aa, Artificial Sequence
  human low-density lipoprotein receptor (LDLR) related protein 2 (LRP2) A domain
CQATMFECKNHVCIPPYWKCDGDDDCGDGSDEELHLC

SEQ ID NO: 143 - protein, 38 aa, Artificial Sequence
  human low-density lipoprotein receptor (LDLR) related protein 2 (LRP2) A domain
CNSPNRFRCDNNRCIYSHEVCNGVDDCGDGTDETEEHC

SEQ ID NO: 144 - protein, 35 aa, Artificial Sequence
  human low-density lipoprotein receptor (LDLR) related protein 2 (LRP2) A domain
CTEYEYKCGNGHCIPHDNVCDDADDCGDWSDELGC

SEQ ID NO: 145 - protein, 38 aa, Artificial Sequence
  human low-density lipoprotein receptor (LDLR) related protein 1B (LR1B) A domain
CDPGEFLCHDHVTCVSQSWLCDGDPDCPDDSDESLDTC

SEQ ID NO: 146 - protein, 37 aa, Artificial Sequence
  human low-density lipoprotein receptor (LDLR) related protein 1B (LR1B) A domain
CPLNHIACLGTNKCVHLSQLCNGVLDCPDGYDEGVHC

SEQ ID NO: 147 - protein, 37 aa, Artificial Sequence
  human low-density lipoprotein receptor (LDLR) related protein 1B (LR1B) A domain
CKAGEFRCKNRHCIQARWKCDGDDDCLDGSDEDSVNC

SEQ ID NO: 148 - protein, 37 aa, Artificial Sequence
  human low-density lipoprotein receptor (LDLR) related protein 1B (LR1B) A domain
CPDDQFKCQNNRCIPKRWLCDGANDCGSNEDESNQTC

SEQ ID NO: 149 - protein, 36 aa, Artificial Sequence
  human low-density lipoprotein receptor (LDLR) related protein 1B (LR1B) A domain
CQVDQFSCGNGRCIPRAWLCDREDDCGDQTDEMASC

SEQ ID NO: 150 - protein, 36 aa, Artificial Sequence
  human low-density lipoprotein receptor (LDLR) related protein 1B (LR1B) A domain
CEPLTQFVCKSGRCISSKWHCDSDDDCGDGSDEVGC

SEQ ID NO: 151 - protein, 37 aa, Artificial Sequence
  human low-density lipoprotein receptor (LDLR) related protein 1B (LR1B) A domain
CFDNQFRCSSGRCIPGHWACDGDNDCGDFSDEAQINC

SEQ ID NO: 152 - protein, 36 aa, Artificial Sequence
  human low-density lipoprotein receptor (LDLR) related protein 1B (LR1B) A domain
CNGNEFQCHPDGNCVPDLWRCDGEKDCEDGSDEKGC

SEQ ID NO: 153 - protein, 37 aa, Artificial Sequence
  human low-density lipoprotein receptor (LDLR) related protein 1B (LR1B) A domain
CDHKTKFSCWSTGRCINKAWVCDGDIDCEDQSDEDDC

SEQ ID NO: 154 - protein, 38 aa, Artificial Sequence
  human low-density lipoprotein receptor (LDLR) related protein 1B (LR1B) A domain
CGPPKHPCANDTSVCLQPEKLCNGKKDCPDGSDEGYLC

SEQ ID NO: 155 - protein, 38 aa, Artificial Sequence
  human low-density lipoprotein receptor (LDLR) related protein 1B (LR1B) A domain
CNAYSEFECGNGECIDYQLTCDGIPHCKDKSDEKLLYC

SEQ ID NO: 156 - protein, 35 aa, Artificial Sequence
  human low-density lipoprotein receptor (LDLR) related protein 1B (LR1B) A domain
CRRGFKPCYNRRCIPHGKLCDGENDCGDNSDELDC

SEQ ID NO: 157 - protein, 35 aa, Artificial Sequence
  human low-density lipoprotein receptor (LDLR) related protein 1B (LR1B) A domain
CATVEFRCADGTCIPRSARCNQNIDCADASDEKNC

SEQ ID NO: 158 - protein, 45 aa, Artificial Sequence
  human low-density lipoprotein receptor (LDLR) related protein 1B (LR1B) A domain
CTHFYKLGVKTTGFIRCNSTSLCVLPTWICDGSNDCGDYSDELKC

SEQ ID NO: 159 - protein, 35 aa, Artificial Sequence
  human low-density lipoprotein receptor (LDLR) related protein 1B (LR1B) A domain
CEENYFSCPSGRCILNTWICDGQKDCEDGRDEFHC

SEQ ID NO: 160 - protein, 37 aa, Artificial Sequence
  human low-density lipoprotein receptor (LDLR) related protein 1B (LR1B) A domain
CSWNQFACSAQKCISKHWICDGEDDCGDGLDESDSIC

SEQ ID NO: 161 - protein, 39 aa, Artificial Sequence
  human low-density lipoprotein receptor (LDLR) related protein 1B (LR1B) A domain
CAADMFSCQGSRACVPRHWLCDGERDCPDGSDELSTAGC

SEQ ID NO: 162 - protein, 36 aa, Artificial Sequence
  human low-density lipoprotein receptor (LDLR) related protein 1B (LR1B) A domain
CDENAFMCHNKVCIPKQFVCDHDDDCGDGSDESPQC

SEQ ID NO: 163 - protein, 40 aa, Artificial Sequence
  human low-density lipoprotein receptor (LDLR) related protein 1B (LR1B) A domain
CGTEEFSCADGRCLLNTQWQCDGDFDCPDHSDEAPLNPKC

SEQ ID NO: 164 - protein, 35 aa, Artificial Sequence
  human low-density lipoprotein receptor (LDLR) related protein 1B (LR1B) A domain
CNSSFFMCKNGRCIPSGGLCDNKDDCGDGSDERNC

SEQ ID NO: 165 - protein, 36 aa, Artificial Sequence
  human low-density lipoprotein receptor (LDLR) related protein 1B (LR1B) A domain
CTASQFRCKTDKCIPFWWKCDTVDDCGDGSDEPDDC

SEQ ID NO: 166 - protein, 35 aa, Artificial Sequence
  human low-density lipoprotein receptor (LDLR) related protein 1B (LR1B) A domain
CQPGRFQCGTGLCALPAFICDGENDCGDNSDELNC

SEQ ID NO: 167 - protein, 36 aa, Artificial Sequence
  human low-density lipoprotein receptor (LDLR) related protein 1B (LR1B) A domain
CLSGQFKCTKNQKCIPVNLRCNGQDDCGDEEDERDC

SEQ ID NO: 168 - protein, 36 aa, Artificial Sequence
  human low-density lipoprotein receptor (LDLR) related protein 1B (LR1B) A domain
CSPDYFQCKTTKHCISKLWVCDEDPDCADASDEANC

SEQ ID NO: 169 - protein, 35 aa, Artificial Sequence
  human low-density lipoprotein receptor (LDLR) related protein 1B (LR1B) A domain
CGPHEFQCKNNNCIPDHWRCDSQNDCSDNSDEENC

SEQ ID NO: 170 - protein, 35 aa, Artificial Sequence
  human low-density lipoprotein receptor (LDLR) related protein 1B (LR1B) A domain
CTLKDFLCANGDCVSSRFWCDGDFDCADGSDERNC

SEQ ID NO: 171 - protein, 35 aa, Artificial Sequence
  human low-density lipoprotein receptor (LDLR) related protein 1B (LR1B) A domain
CSKDQFRCSNGQCIPAKWKCDGHEDCKYGEDEKSC

SEQ ID NO: 172 - protein, 35 aa, Artificial Sequence
  human low-density lipoprotein receptor (LDLR) related protein 1B (LR1B) A domain
CSSREYICASDGCISASLKCNGEYDCADGSDEMDC

SEQ ID NO: 173 - protein, 36 aa, Artificial Sequence
  human low-density lipoprotein receptor (LDLR) related protein 1B (LR1B) A domain
CKEDQFRCKNKAHCIPIRWLCDGIHDCVDGSDEENC

SEQ ID NO: 174 - protein, 37 aa, Artificial Sequence
  human low-density lipoprotein receptor (LDLR) related protein 1B (LR1B) A domain
CRADEFLCNNSLCKLHFWVCDGEDDCGDNSDEAPDMC

SEQ ID NO: 175 - protein, 37 aa, Artificial Sequence
  human low-density lipoprotein receptor (LDLR) related protein 1B (LR1B) A domain
CPSTRPHRCRNNRICLQSEQMCNGIDECGDNSDEDHC

SEQ ID NO: 176 - protein, 35 aa, Artificial Sequence
  human low-density lipoprotein receptor (LDLR) related protein 1B (LR1B) A domain
CKKDEFACSNKKCIPMDLQCDRLDDCGDGSDEQGC

SEQ ID NO: 177 - protein, 37 aa, Artificial Sequence
  O75851 A domain
CAEGEALCQENGHCVPHGWLCDNQDDCGDGSDEEGEC

SEQ ID NO: 178 - protein, 37 aa, Artificial Sequence
  O75851 A domain
CGEGQMTCSSGHCLPLALLCDRQDDCGDGTDEPSYPC

SEQ ID NO: 179 - protein, 35 aa, Artificial Sequence
  O75851 A domain
CPQGLLACADGRCLPPALLCDGHPDCLDAADEESC

SEQ ID NO: 180 - protein, 37 aa, Artificial Sequence
  O75851 A domain
CVPGEVSCVDGTCLGAIQLCDGVWDCPDGADEGPGHC

SEQ ID NO: 181 - protein, 35 aa, Artificial Sequence
  ENSP00000262089 = O75851 A domain
CGPFEFRCGSGECTPRGWRCDQEEDCADGSDERGC

SEQ ID NO: 182 - protein, 38 aa, Artificial Sequence
  ENSP00000262089 A domain
CAPHHAPCARGPHCVSPEQLCDGVRQCPDGSDEGPDAC

SEQ ID NO: 183 - protein, 36 aa, Artificial Sequence
  O75851 A domain
CPGLFPCGVAPGLCLTPEQLCDGIPDCPQGEDELDC

SEQ ID NO: 184 - protein, 39 aa, Artificial Sequence
  O75851 A domain
CPEYTCPNGTCIGFQLVCDGQPDCGRPGQVGPSPEEQGC

SEQ ID NO: 185 - protein, 36 aa, Artificial Sequence
  O75851 A domain
CEPGVGLRCASGECVLRGGPCDGVLDCEDGSDEEGC

SEQ ID NO: 186 - protein, 35 aa, Artificial Sequence
  ENSP00000262089 A domain
CGPGQTPCEVLGCVEQAQVCDGREDCLDGSDERHC

SEQ ID NO: 187 - protein, 35 aa, Artificial Sequence
  O75851 A domain
CSPSQLSCGSGECLSAERRCDLRPDCQDGSDEDGC

SEQ ID NO: 188 - protein, 33 aa, Artificial Sequence
  C18oRF1 A domain
CKFTCTSGKCLYLGSLVCNQQNDCGDNSDEENC

SEQ ID NO: 189 - protein, 36 aa, Artificial Sequence
  AAH07083/Q9NPF0 A domain
CPPTKFQCRTSGLCVPLTWRCDRDLDCSDGSDEEEC

SEQ ID NO: 190 - protein, 36 aa, Artificial Sequence
  AAH07083/Q9NPF0 A domain
CLAGELRCTLSDDCIPLTWRCDGHPDCPDSSDELGC

SEQ ID NO: 191 - protein, 36 aa, Artificial Sequence
  Q9HBX9 A domain
CSLGYFPCGNITKCLPQLLHCNGVDDCGNQADEDNC

SEQ ID NO: 192 - protein, 35 aa, Artificial Sequence
  Q9BY79/Q96DQ9 A domain
CAHDEFRCDQLICLLPDSVCDGFANCADGSDETNC

SEQ ID NO: 193 - protein, 34 aa, Artificial Sequence
  Q9BY79/Q96DQ9 A domain
CGPSELSCQAGGCKGVQWMCDMWRDCTDGSDDNC

SEQ ID NO: 194 - protein, 35 aa, Artificial Sequence
  BAB55257 = ENSP00000239367 A domain
CSRYHFFCDDGCCIDITLACDGVQQCPDGSDEDFC

SEQ ID NO: 195 - protein, 32 aa, Artificial Sequence
  O95518 = ENSP00000255793 A domain
CPGEFLCSVNGLCVPACDGVKDCPNGLDERNC

SEQ ID NO: 196 - protein, 35 aa, Artificial Sequence
  ENSP00000255793 A domain
CRATFQCKEDSTCISLPKVCDGQPDCLNGSDEEQC

SEQ ID NO: 197 - protein, 36 aa, Artificial Sequence
  ENSP00000255793 A domain
CGTFTFQCEDRSCVKKPNPQCDGRPDCRDGSDEEHC

SEQ ID NO: 198 - protein, 36 aa, Artificial Sequence
  Q8WXD0 A domain
CQKGYFPCGNLTKCLPRAFHCDGKDDCGNGADEENC

SEQ ID NO: 199 - protein, 35 aa, Artificial Sequence
  Q8NBJ0 A domain
CSTARYHCKNGLCIDKSFICDGQNNCQDNSDEESC

SEQ ID NO: 200 - protein, 36 aa, Artificial Sequence
  Q8NBJ0 A domain
CGPTFFPCASGIHCIIGRFRCNGFEDCPDGSDEENC

SEQ ID NO: 201 - protein, 36 aa, Artificial Sequence
  Q8NBJ0 A domain
CNIPGNFMCSNGRCIPGAWQCDGLPDCFDKSDEKEC

SEQ ID NO: 202 - protein, 38 aa, Artificial Sequence
  MEGF7 A domain
CALDQFLCWNGRCIGQRKLCNGVNDCGDNSDESPQQNC

SEQ ID NO: 203 - protein, 34 aa, Artificial Sequence
  MEGF7 A domain
CEEDEFPCQNGYCIRSLWHCDGDNDCGDNSDEQC

SEQ ID NO: 204 - protein, 35 aa, Artificial Sequence
  MEGF7 A domain
CRSGEFMCDSGLCINAGWRCDGDADCDDQSDERNC

SEQ ID NO: 205 - protein, 35 aa, Artificial Sequence
  MEGF7 A domain
CTAEQFRCHSGRCVRLSWRCDGEDDCADNSDEENC

SEQ ID NO: 206 - protein, 35 aa, Artificial Sequence
  MEGF7 A domain
CSPLDFHCDNGKCIRRSWVCDGDNDCEDDSDEQDC

SEQ ID NO: 207 - protein, 35 aa, Artificial Sequence
  MEGF7 A domain
CNLEEFQCAYGRCILDIYHCDGDDDCGDWSDESDC

SEQ ID NO: 208 - protein, 35 aa, Artificial Sequence
  MEGF7 A domain
CSDKEFRCSDGSCIAEHWYCDGDTDCKDGSDEENC

SEQ ID NO: 209 - protein, 40 aa, Artificial Sequence
  MEGF7 A domain
CGRSHFTCAVSALGECTCIPAQWQCDGDNDCGDHSDEDGC

SEQ ID NO: 210 - protein, 35 aa, Artificial Sequence
  CAD61944 A domain
CLQEEFQCLNHRCVSAVQRCDGVDACGDGSDEAGC

SEQ ID NO: 211 - protein, 41 aa, Artificial Sequence
  CAD61944 A domain
CPPGHFPCGAAGTSGATACYLPADRCNYQTFCADGADERRC

SEQ ID NO: 212 - protein, 35 aa, Artificial Sequence
  CAD61944 A domain
CQPGNFRCRDEKCVYETWVCDGQPDCADGSDEWDC

SEQ ID NO: 213 - protein, 36 aa, Artificial Sequence
  ENSG00000181006 A domain
CPEITDFLCRDKKCIASHLLCDYKPDCSDRSDEAHC

SEQ ID NO: 214 - protein, 36 aa, Artificial Sequence
  ENSG00000320248 A domain
CNNRTFKCGNDICFRKQNAKCDGTVDCPDGSDEEGC

SEQ ID NO: 215 - protein, 37 aa, Artificial Sequence
  ENSG00000277547 A domain
CPPGHHHCQNKVCVEPQQLCDGEDNCGDLSDENPLTC

SEQ ID NO: 216 - protein, 34 aa, Artificial Sequence
  ENSG00000320022 A domain
CKQGHLACGDLCVPPEQLCDFEEQCAGGEDEQAC

SEQ ID NO: 217 - protein, 36 aa, Artificial Sequence
  ENSG00000313222 A domain
CPGNSFSCGNSQCVTKVNPECDDQEDCSDGSDEAHC

SEQ ID NO: 218 - protein, 4 aa, Artificial Sequence
  beta-Propeller domain repeated sequence
YWTD

SEQ ID NO: 219 - protein, 64 aa, Artificial Sequence
  LDL receptor class A domain monomer sequence
  MOD_RES (2)...(16): Xaa = any amino acid, Xaa at positions 5-16 may be present or absent
  MOD_RES (18)...(32): Xaa = any amino acid, Xaa at positions 21-32 may be present or absent
  MOD_RES (34)...(40): Xaa = any amino acid, Xaa at position 40 may be present or absent
  MOD_RES (43)...(46): Xaa = any amino acid
  MOD_RES (48)...(53): Xaa = any amino acid, Xaa at positions 52-53 may be present or absent
  MOD_RES (56)...(63): Xaa = any amino acid, Xaa at positions 58-63 may be present or absent
  DISULFID (1)...(33)
  DISULFID (17)...(47)
  DISULFID (41)...(64)
CXXXXXXXXXXXXXXXCXXXXXXXXXXXXXXXCXXXXXXXCBXXXXCXXXXXXDEXXXXXXXXC

SEQ ID NO: 220 - protein, 35 aa, Artificial Sequence
  LDL receptor class A domain monomer sequence
  MOD_RES (2)...(2): Xaa = Ala, Asp, Glu, Phe, Gly, His, Lys, Leu, Met, Asn, Pro, Gln, Arg, Ser, Thr or Val
  MOD_RES (3)...(3): Xaa = Ala, Cys, Asp, Glu, Gly, His, Ile, Lys, Leu, Met, Asn, Pro, Gln, Arg, Ser, Thr, Val, Trp or Tyr
  MOD_RES (4)...(4): Xaa = Ala, Asp, Glu, Phe, Gly, His, Lys, Leu, Met, Asn, Gln, Arg, Ser, Thr or Tyr
  MOD_RES (5)...(5): Xaa = Ala, Phe, His, Ile, Lys, Leu, Met, Gln, Arg, Ser, Thr, Val, Trp or Tyr
  MOD_RES (6)...(6): Xaa = Ala, Glu, Phe, His, Ile, Lys, Leu, Met, Asn, Pro, Gln, Arg, Ser, Thr or Val
  MOD_RES (9)...(9): Xaa = Ala, Asp, Glu, Phe, Gly, His, Lys, Leu, Asn, Pro, Gln, Arg, Ser, Thr, Val or Tyr
  MOD_RES (10)...(10): Xaa = Ala, Asp, Gly, His, Asn, Gln, Arg, Ser, Thr, Val or Tyr
  MOD_RES (11)...(11): Xaa = Asp, Glu, Gly, His, Lys, Leu, Asn, Gln, Arg, Ser or Thr
  MOD_RES (12)...(12): Xaa = Ala, Cys, Asp, Glu, Phe, Gly, His, Ile, Lys, Leu, Met, Asn, Gln, Arg, Ser, Thr or Val
  MOD_RES (14)...(14): Xaa = Ala, Phe, Ile, Lys, Leu, Thr, Val or Tyr
  MOD_RES (15)...(15): Xaa = Ala, Asp, Glu, Phe, Gly, His, Lys, Leu, Met, Asn, Pro, Gln, Arg, Ser, Thr, Val, Trp or Tyr
  MOD_RES (16)...(16): Xaa = Ala, Asp, Glu, Phe, Gly, His, Ile, Lys, Leu, Met, Asn, Pro, Gln, Arg, Ser, Thr, Val, Trp or Tyr
  MOD_RES (17)...(17): Xaa = Ala, Asp, Glu, Phe, Gly, His, Ile, Lys, Leu, Met, Asn, Pro, Gln, Arg, Ser, Thr, Val, Trp or Tyr
  MOD_RES (18)...(18): Xaa = Ala, Asp, Glu, Phe, Gly, Lys, Met, Asn, Gln, Arg, Ser, Thr, Val, Trp or Tyr
  MOD_RES (19)...(19): Xaa = Ala, Glu, Phe, His, Ile, Lys, Leu, Met, Pro, Gln, Arg, Thr, Val, Trp or Tyr
  MOD_RES (22)...(22): Xaa = Ala, Asp, Glu, Phe, Gly, His, Lys, Met, Asn, Gln, Arg, Ser, Thr, Val, Trp or Tyr
  MOD_RES (23)...(23): Xaa = Ala, Asp, Glu, Phe, Gly, His, Ile, Lys, Leu, Met, Asn, Gln, Arg, Ser, Thr, Val, Trp or Tyr
  MOD_RES (24)...(24): Xaa = Ala, Asp, Glu, Phe, His, Ile, Lys, Leu, Asn, Pro, Gln, Arg, Ser, Thr, Val, Trp or Tyr
  MOD_RES (24)...(24): Xaa = Ala, Asp, Glu, Phe, His, Ile, Lys, Leu, Asn, Pro, Gln, Arg, Ser, Thr, Val, Trp or Tyr
  MOD_RES (25)...(25): Xaa = Asp, Glu, His, Asn, Gln, Ser or Thr
  MOD_RES (27)...(27): Xaa = Ala, Asp, Glu, Gly, His, Ile, Lys, Leu, Met, Pro, Gln, Arg, Ser, Thr or Val
  MOD_RES (28)...(28): Xaa = Asp, Gly, His, Asn, Gln, Ser, Thr or Tyr
  MOD_RES (29)...(29): Xaa = Ala, Asp, Glu, Phe, Gly, His, Lys, Leu, Met, Asn, Gln, Arg, Ser, Trp or Tyr
  MOD_RES (30)...(30): Xaa = Ala, Glu, Gly, Leu, Met, Arg, Ser or Thr
  MOD_RES (33)...(33): Xaa = Ala, Asp, Glu, Phe, Gly, His, Ile, Lys, Leu, Met, Asn, Gln, Arg, Ser, Thr, Val, Trp or Tyr
  MOD_RES (34)...(34): Xaa = Ala, Asp, Glu, Phe, Gly, His, Ile, Lys, Leu, Met, Asn, Pro, Gln, Arg or Ser
CXXXXXXCXXXXCXXXXXXCBXXXXCXXXXDEXXC

SEQ ID NO: 221 - protein, 36 aa, Artificial Sequence
  LDL receptor class A domain monomer sequence
  MOD_RES (2)...(2): Xaa = Ala, Asp, Glu, Phe, Gly, His, Lys, Leu, Met, Asn, Pro, Gln, Arg, Ser, Thr or Val
  MOD_RES (3)...(3): Xaa = Ala, Cys, Asp, Glu, Gly, His, Ile, Lys, Leu, Met, Asn, Pro, Gln, Arg, Ser, Thr, Val, Trp or Tyr
  MOD_RES (4)...(4): Xaa = Ala, Asp, Glu, Phe, Gly, His, Lys, Asn, Pro, Gln, Arg, Ser, Thr, Val, Trp or Tyr
  MOD_RES (5)...(5): Xaa = Ala, Asp, Glu, Phe, Gly, His, Lys, Leu, Met, Asn, Gln, Arg, Ser, Thr or Tyr
  MOD_RES (6)...(6): Xaa = Ala, Phe, His, Ile, Lys, Leu, Met, Gln, Arg, Ser, Thr, Val, Trp or Tyr
  MOD_RES (7)...(7): Xaa = Ala, Glu, Phe, His, Ile, Lys, Leu, Met, Asn, Pro, Gln, Arg, Ser, Thr or Val
  MOD_RES (9)...(9): Xaa = Ala, Asp, Glu, Phe, Gly, His, Lys, Leu, Asn, Pro, Gln, Arg, Ser, Thr, Val or Tyr
  MOD_RES (10)...(10): Xaa = Ala, Asp, Gly, His, Asn, Gln, Arg, Ser, Thr, Val or Tyr
  MOD_RES (11)...(11): Xaa = Asp, Glu, Gly, His, Lys, Leu, Asn, Gln, Arg, Ser or Thr
  MOD_RES (12)...(12): Xaa = Ala, Cys, Asp, Glu, Phe, Gly, His, Ile, Lys, Leu, Met, Asn, Gln, Arg, Ser, Thr or Val
  MOD_RES (14)...(14): Xaa = Ala, Phe, Ile, Lys, Leu, Thr, Val or Tyr
  MOD_RES (15)...(15): Xaa = Ala, Asp, Glu, Phe, Gly, His, Lys, Leu, Met, Asn, Pro, Gln, Arg, Ser, Thr, Val, Trp or Tyr
  MOD_RES (16)...(16): Xaa = Ala, Asp, Glu, Phe, Gly, His, Ile, Lys, Leu, Met, Asn, Pro, Gln, Arg, Ser, Thr, Val, or Tyr
  MOD_RES (17)...(17): Xaa = Ala, Asp, Glu, Phe, Gly, His, Ile, Lys, Leu, Met, Asn, Pro, Gln, Arg, Ser, Thr, Val, Trp or Tyr
  MOD_RES (18)...(18): Xaa = Ala, Asp, Glu, Phe, Gly, Lys, Leu, Met, Asn, Gln, Arg, Ser, Thr, Val, Trp or Tyr
  MOD_RES (19)...(19): Xaa = Ala, Glu, Phe, His, Ile, Lys, Leu, Met, Pro, Gln, Arg, Thr, Val, Trp or Tyr
  MOD_RES (22)...(22): Xaa = Ala, Asp, Glu, Phe, Gly, His, Lys, Leu, Met, Asn, Gln, Arg, Ser, Thr, Val, Trp or Tyr
  MOD_RES (23)...(23): Xaa = Ala, Asp, Glu, Phe, Gly, His, Ile, Lys, Leu, Met, Asn, Gln, Arg, Ser, Thr, Val, Trp or Tyr
  MOD_RES (24)...(24): Xaa = Ala, Asp, Glu, Phe, His, Ile, Lys, Leu, Asn, Pro, Gln, Arg, Ser, Thr, Val, Trp or Tyr
  MOD_RES (25)...(25): Xaa = Asp, Glu, His, Asn, Gln, Ser or Thr
  MOD_RES (27)...(27): Xaa = Ala, Asp, Phe, Gly, Leu, Met, Pro, Ser, Thr or Val
  MOD_RES (29)...(29): Xaa = Ala, Gly, His, Gln or Arg
  MOD_RES (30)...(30): Xaa = Ser, Thr or Tyr
  MOD_RES (33)...(33): Xaa = Ala, Glu, Gly, His, Leu, Met, Asn, Pro, Arg or Ser
  MOD_RES (34)...(34): Xaa = Ala, Asp, Glu, Gly, Asn, Pro, Gln, Val or Tyr
  MOD_RES (35)...(35): Xaa = Ala, Asp, Glu, His, Leu, Asn, Gln or Ser
CXXXXXXCXXXXCXXXXXXCBXXXXCXXBXDEXXXC

SEQ ID NO: 222 - protein, 37 aa, Artificial Sequence
  LDL receptor class A domain monomer sequence
  MOD_RES (2)...(2): Xaa = Ala, Asp, Glu, Phe, Gly, His, Lys, Leu, Met, Asn, Pro, Gln, Arg, Ser, Thr or Val
  MOD_RES (3)...(3): Xaa = Ala, Cys, Asp, Glu, Gly, His, Ile, Lys, Leu, Met, Asn, Pro, Gln, Arg, Ser, Thr, Val, Trp or Tyr
  MOD_RES (4)...(4): Xaa = Ala, Asp, Glu, Phe, Gly, His, Lys, Asn, Pro, Gln, Arg, Ser, Thr, Val, Trp or Tyr
  MOD_RES (5)...(5): Xaa = Ala, Asp, Glu, Phe, Gly, His, Lys, Leu, Met, Asn, Gln, Arg, Ser, Thr or Tyr
  MOD_RES (6)...(6): Xaa = Ala, Phe, His, Ile, Lys, Leu, Met, Gln, Arg, Ser, Thr, Val, Trp or Tyr
  MOD_RES (7)...(7): Xaa = Ala, Glu, Phe, His, Ile, Lys, Leu, Met, Asn, Pro, Gln, Arg, Ser, Thr or Val
  MOD_RES (9)...(9): Xaa = Ala, Asp, Glu, Phe, Gly, His, Lys, Leu, Asn, Pro, Gln, Arg, Ser, Thr, Val or Tyr
  MOD_RES (10)...(10): Xaa = Ala, Asp, Gly, His, Asn, Gln, Arg, Ser, Thr, Val or Tyr
  MOD_RES (11)...(11): Xaa = Asp, Glu, Gly, His, Lys, Leu, Asn, Gln, Arg, Ser or Thr
  MOD_RES (12)...(12): Xaa = Ala, Cys, Asp, Glu, Phe, Gly, His, Ile, Lys, Leu, Met, Asn, Gln, Arg, Ser, Thr or Val
  MOD_RES (14)...(14): Xaa = Ala, Phe, Ile, Lys, Leu, Thr, Val or Tyr
  MOD_RES (15)...(15): Xaa = Ala, Asp, Glu, Phe, Gly, His, Lys, Leu, Met, Asn, Pro, Gln, Arg, Ser, Thr, Val, Trp or Tyr
  MOD_RES (16)...(16): Xaa = Ala, Asp, Glu, Phe, Gly, His, Ile, Lys, Leu, Met, Asn, Pro, Gln, Arg, Ser, Thr, Val, or Tyr
  MOD_RES (17)...(17): Xaa = Ala, Asp, Glu, Phe, Gly, His, Ile, Lys, Leu, Met, Asn, Pro, Gln, Arg, Ser, Thr, Val, Trp or Tyr
  MOD_RES (18)...(18): Xaa = Ala, Asp, Glu, Phe, Gly, Lys, Leu, Met, Asn, Gln, Arg, Ser, Thr, Val, Trp or Tyr
  MOD_RES (19)...(19): Xaa = Ala, Glu, Phe, His, Ile, Lys, Leu, Met, Pro, Gln, Arg, Thr, Val, Trp or Tyr
  MOD_RES (22)...(22): Xaa = Ala, Asp, Glu, Phe, Gly, His, Lys, Leu, Met, Asn, Gln, Arg, Ser, Thr, Val, Trp or Tyr
  MOD_RES (23)...(23): Xaa = Ala, Asp, Glu, Phe, Gly, His, Ile, Lys, Leu, Met, Asn, Gln, Arg, Ser, Thr, Val, Trp or Tyr
  MOD_RES (24)...(24): Xaa = Ala, Asp, Glu, Phe, His, Ile, Lys, Leu, Asn, Pro, Gln, Arg, Ser, Thr, Val, Trp or Tyr
  MOD_RES (25)...(25): Xaa = Asp, Glu, His, Asn, Gln, Ser or Thr
  MOD_RES (27)...(27): Xaa = Glu, Gly, Lys, Leu, Pro, Gln, Arg or Ser
  MOD_RES (28)...(28): Xaa = Asp, Asn or Ser
  MOD_RES (29)...(29): Xaa = Asp, Phe, Gly, His, Lys, Asn, Gln, Arg, Ser, Trp or Tyr
  MOD_RES (30)...(30): Xaa = Ala, Glu, Leu, Ser or Thr
  MOD_RES (33)...(33): Xaa = Ala, Asp, Glu, Gly, Lys, Leu, Met, Asn, Pro, Ser, Thr or Trp
  MOD_RES (34)...(34): Xaa = Ala, Asp, Glu, His, Ile, Lys, Leu, Met, Asn, Pro, Gln, Arg or Ser
  MOD_RES (35)...(35): Xaa = Ala, Asp, Glu, Gly, His, Ile, Lys, Leu, Gln, Ser, Thr, Val or Tyr
  MOD_RES (36)...(36): Xaa = Ala, Glu, His, Ile, Leu, Met, Asn, Pro, Gln, Arg, Thr, Val or Tyr
CXXXXXXCXXXXCXXXXXXCBXXXXCXXXXDEXXXXC

SEQ ID NO: 223 - protein, 36 aa, Artificial Sequence
  LDL receptor class A domain monomer sequence
  MOD_RES (2)...(2): Xaa = Ala, Asp, Glu, Phe, Gly, His, Lys, Leu, Asn, Pro, Arg, Ser or Thr
  MOD_RES (3)...(3): Xaa = Ala, Asp, Glu, Gly, His, Leu, Asn, Pro, Arg, Ser or Thr
  MOD_RES (4)...(4): Xaa = Asp, Phe, Gly, Lys, Leu, Asn, Pro, Gln, Arg, Ser, Thr, Val or Tyr
  MOD_RES (5)...(5): Xaa = Asp, Glu, Phe, Gly, His, Lys, Met, Asn, Arg, Ser, Thr or Val
  MOD_RES (6)...(6): Xaa = Asp, Glu, Gly, Lys, Leu, Asn, Pro, Gln or Arg
  MOD_RES (7)...(7): Xaa = Phe, His, Leu, Val or Trp
  MOD_RES (8)...(8): Xaa = Ala, Glu, Gly, Lys, Leu, Met, Arg, Ser, Thr or Val
  MOD_RES (10)...(10): Xaa = Ala, Asp, Glu, Phe, Gly, His, Lys, Leu, Asn, Pro, Gln, Arg, Ser, Thr, Val or Tyr
  MOD_RES (11)...(11): Xaa = Ala, Asp, Gly, His, Asn, Gln, Arg, Ser, Thr, Val or Tyr
  MOD_RES (12)...(12): Xaa = Asp, Glu, Gly, His, Lys, Leu, Asn, Gln, Arg, Ser or Thr
  MOD_RES (13)...(13): Xaa = Ala, Cys, Asp, Glu, Phe, Gly, His, Ile, Lys, Leu, Met, Asn, Gln, Arg, Ser, Thr or Val
  MOD_RES (15)...(15): Xaa = Ala, Phe, Ile, Lys, Leu, Thr, Val or Tyr
  MOD_RES (16)...(16): Xaa = Ala, Asp, Glu, Phe, Gly, His, Lys, Leu, Met, Asn, Pro, Gln, Arg, Ser, Thr, Val, Trp or Tyr
  MOD_RES (17)...(17): Xaa = Ala, Asp, Glu, Phe, Gly, His, Ile, Lys, Leu, Met, Asn, Pro, Gln, Arg, Ser, Thr, Val, or Tyr
  MOD_RES (18)...(18): Xaa = Ala, Asp, Glu, Phe, Gly, His, Ile, Lys, Leu, Met, Asn, Pro, Gln, Arg, Ser, Thr, Val, Trp or Tyr
  MOD_RES (19)...(19): Xaa = Ala, Asp, Glu, Phe, Gly, Lys, Leu, Met, Asn, Gln, Arg, Ser, Thr, Val, Trp or Tyr
  MOD_RES (20)...(20): Xaa = Ala, Glu, Phe, His, Ile, Lys, Leu, Met, Pro, Gln, Arg, Thr, Val, Trp or Tyr
  MOD_RES (23)...(23): Xaa = Ala, Asp, Glu, Phe, Gly, His, Lys, Leu, Met, Asn, Gln, Arg, Ser, Thr, Val, Trp or Tyr
  MOD_RES (24)...(24): Xaa = Ala, Asp, Glu, Phe, Gly, His, Ile, Lys, Leu, Met, Asn, Gln, Arg, Ser, Thr, Val, Trp or Tyr
  MOD_RES (25)...(25): Xaa = Ala, Asp, Glu, Phe, His, Ile, Lys, Leu, Asn, Pro, Gln, Arg, Ser, Thr, Val, Trp or Tyr
  MOD_RES (26)...(26): Xaa = Asp, Glu, His, Asn, Gln, Ser or Thr
  MOD_RES (28)...(28): Xaa = Ala, Asp, Glu, Gly, His, Ile, Lys, Leu, Met, Pro, Gln, Arg, Ser, Thr or Val
  MOD_RES (29)...(29): Xaa = Asp, Gly, His, Asn, Gln, Ser, Thr or Tyr
  MOD_RES (30)...(30): Xaa = Ala, Asp, Glu, Phe, Gly, His, Lys, Leu, Met, Asn, Gln, Arg, Ser, Trp or Tyr
  MOD_RES (31)...(31): Xaa = Ala, Glu, Gly, Leu, Met, Arg, Ser or Thr
  MOD_RES (34)...(34): Xaa = Ala, Asp, Glu, Phe, Gly, His, Ile, Lys, Leu, Met, Asn, Gln, Arg, Ser, Thr, Val, Trp or Tyr
  MOD_RES (35)...(35): Xaa = Ala, Asp, Glu, Phe, Gly, His, Ile, Lys, Leu, Met, Asn, Pro, Gln, Arg or Ser
CXXXXXXXCXXXXCXXXXXXCBXXXXCXXXXDEXXC

SEQ ID NO: 224 - protein, 37 aa, Artificial Sequence
  LDL receptor class A domain monomer sequence
  MOD_RES (2)...(2): Xaa = Ala, Asp, Glu, Phe, Gly, His, Lys, Leu, Asn, Pro, Arg, Ser or Thr
  MOD_RES (3)...(3): Xaa = Ala, Asp, Glu, Gly, His, Leu, Asn, Pro, Arg, Ser or Thr
  MOD_RES (4)...(4): Xaa = Asp, Phe, Gly, Lys, Leu, Asn, Pro, Gln, Arg, Ser, Thr, Val or Tyr
  MOD_RES (5)...(5): Xaa = Asp, Glu, Phe, Gly, His, Lys, Met, Asn, Arg, Ser, Thr or Val
  MOD_RES (6)...(6): Xaa = Asp, Glu, Gly, Lys, Leu, Asn, Pro, Gln or Arg
  MOD_RES (7)...(7): Xaa = Phe, His, Leu, Val or Trp
  MOD_RES (8)...(8): Xaa = Ala, Glu, Gly, Lys, Leu, Met, Arg, Ser, Thr or Val
  MOD_RES (10)...(10): Xaa = Ala, Asp, Glu, Phe, Gly, His, Lys, Leu, Asn, Pro, Gln, Arg, Ser, Thr, Val or Tyr
  MOD_RES (11)...(11): Xaa = Ala, Asp, Gly, His, Asn, Gln, Arg, Ser, Thr, Val or Tyr
  MOD_RES (12)...(12): Xaa = Asp, Glu, Gly, His, Lys, Leu, Asn, Gln, Arg, Ser or Thr
  MOD_RES (13)...(13): Xaa = Ala, Cys, Asp, Glu, Phe, Gly, His, Ile, Lys, Leu, Met, Asn, Gln, Arg, Ser, Thr or Val
  MOD_RES (15)...(15): Xaa = Ala, Phe, Ile, Lys, Leu, Thr, Val or Tyr
  MOD_RES (16)...(16): Xaa = Ala, Asp, Glu, Phe, Gly, His, Lys, Leu, Met, Asn, Pro, Gln, Arg, Ser, Thr, Val, Trp or Tyr
  MOD_RES (17)...(17): Xaa = Ala, Asp, Glu, Phe, Gly, His, Ile, Lys, Leu, Met, Asn, Pro, Gln, Arg, Ser, Thr, Val, or Tyr
  MOD_RES (18)...(18): Xaa = Ala, Asp, Glu, Phe, Gly, His, Ile, Lys, Leu, Met, Asn, Pro, Gln, Arg, Ser, Thr, Val, Trp or Tyr
  MOD_RES (19)...(19): Xaa = Ala, Asp, Glu, Phe, Gly, Lys, Leu, Met, Asn, Gln, Arg, Ser, Thr, Val, Trp or Tyr
  MOD_RES (20)...(20): Xaa = Ala, Glu, Phe, His, Ile, Lys, Leu, Met, Pro, Gln, Arg, Thr, Val, Trp or Tyr
  MOD_RES (23)...(23): Xaa = Ala, Asp, Glu, Phe, Gly, His, Lys, Leu, Met, Asn, Gln, Arg, Ser, Thr, Val, Trp or Tyr
  MOD_RES (24)...(24): Xaa = Ala, Asp, Glu, Phe, Gly, His, Ile, Lys, Leu, Met, Asn, Gln, Arg, Ser, Thr, Val, Trp or Tyr
  MOD_RES (25)...(25): Xaa = Ala, Asp, Glu, Phe, His, Ile, Lys, Leu, Asn, Pro, Gln, Arg, Ser, Thr, Val, Trp or Tyr
  MOD_RES (26)...(26): Xaa = Asp, Glu, His, Asn, Gln, Ser or Thr
  MOD_RES (28)...(28): Xaa = Ala, Asp, Phe, Gly, Leu, Met, Pro, Ser, Thr or Val
  MOD_RES (30)...(30): Xaa = Ala, Gly, His, Gln or Arg
  MOD_RES (31)...(31): Xaa = Ser, Thr or Tyr
  MOD_RES (34)...(34): Xaa = Ala, Glu, Gly, His, Leu, Met, Asn, Pro, Arg or Ser
  MOD_RES (35)...(35): Xaa = Ala, Asp, Glu, Gly, Asn, Pro, Gln, Val or Tyr
  MOD_RES (36)...(36): Xaa = Ala, Asp, Glu, His, Leu, Asn, Gln or Ser
CXXXXXXXCXXXXCXXXXXXCBXXXXCXBXXDEXXXC

SEQ ID NO: 225 - protein, 37 aa, Artificial Sequence
  LDL receptor class A domain monomer sequence
  MOD_RES (2)...(2): Xaa = Ala, Asp, Glu, Phe, Gly, His, Lys, Leu, Asn, Pro, Arg, Ser or Thr
  MOD_RES (3)...(3): Xaa = Ala, Asp, Glu, Gly, His, Leu, Asn, Pro, Arg, Ser or Thr
  MOD_RES (4)...(4): Xaa = Asp, Phe, Gly, Lys, Leu, Asn, Pro, Gln, Arg, Ser, Thr, Val or Tyr
  MOD_RES (5)...(5): Xaa = Asp, Glu, Phe, Gly, His, Lys, Met, Asn, Arg, Ser, Thr or Val
  MOD_RES (6)...(6): Xaa = Asp, Glu, Gly, Lys, Leu, Asn, Pro, Gln or Arg
  MOD_RES (7)...(7): Xaa = Phe, His, Leu, Val or Trp
  MOD_RES (8)...(8): Xaa = Ala, Glu, Gly, Lys, Leu, Met, Arg, Ser, Thr or Val
  MOD_RES (10)...(10): Xaa = Ala, Asp, Glu, Phe, Gly, His, Lys, Leu, Asn, Pro, Gln, Arg, Ser, Thr, Val or Tyr
  MOD_RES (11)...(11): Xaa = Ala, Asp, Gly, His, Asn, Gln, Arg, Ser, Thr, Val or Tyr
  MOD_RES (12)...(12): Xaa = Asp, Glu, Gly, His, Lys, Leu, Asn, Gln, Arg, Ser or Thr
  MOD_RES (13)...(13): Xaa = Ala, Cys, Asp, Glu, Phe, Gly, His, Ile, Lys, Leu, Met, Asn, Gln, Arg, Ser, Thr or Val
  MOD_RES (15)...(15): Xaa = Ala, Phe, Ile, Lys, Leu, Thr, Val or Tyr
  MOD_RES (16)...(16): Xaa = Ala, Asp, Glu, Phe, Gly, His, Lys, Leu, Met, Asn, Pro, Gln, Arg, Ser, Thr, Val, Trp or Tyr
  MOD_RES (17)...(17): Xaa = Ala, Asp, Glu, Phe, Gly, His, Ile, Lys, Leu, Met, Asn, Pro, Gln, Arg, Ser, Thr, Val, or Tyr
  MOD_RES (18)...(18): Xaa = Ala, Asp, Glu, Phe, Gly, His, Ile, Lys, Leu, Met, Asn, Pro, Gln, Arg, Ser, Thr, Val, Trp or Tyr
  MOD_RES (19)...(19): Xaa = Ala, Asp, Glu, Phe, Gly, Lys, Leu, Met, Asn, Gln, Arg, Ser, Thr, Val, Trp or Tyr
  MOD_RES (20)...(20): Xaa = Ala, Glu, Phe, His, Ile, Lys, Leu, Met, Pro, Gln, Arg, Thr, Val, Trp or Tyr
  MOD_RES (23)...(23): Xaa = Ala, Asp, Glu, Phe, Gly, His, Lys, Leu, Met, Asn, Gln, Arg, Ser, Thr, Val, Trp or Tyr
  MOD_RES (24)...(24): Xaa = Ala, Asp, Glu, Phe, Gly, His, Ile, Lys, Leu, Met, Asn, Gln, Arg, Ser, Thr, Val, Trp or Tyr
  MOD_RES (25)...(25): Xaa = Ala, Asp, Glu, Phe, His, Ile, Lys, Leu, Asn, Pro, Gln, Arg, Ser, Thr, Val, Trp or Tyr
  MOD_RES (26)...(26): Xaa = Asp, Glu, His, Asn, Gln, Ser or Thr
  MOD_RES (28)...(28): Xaa = Glu, Gly, Lys, Leu, Pro, Gln, Arg or Ser
  MOD_RES (29)...(29): Xaa = Asp, Asn or Ser
  MOD_RES (30)...(30): Xaa = Asp, Phe, Gly, His, Lys, Asn, Gln, Arg, Ser, Trp or Tyr
  MOD_RES (31)...(31): Xaa = Ala, Glu, Leu, Ser or Thr
  MOD_RES (34)...(34): Xaa = Ala, Asp, Glu, Gly, Lys, Leu, Met, Asn, Pro, Ser, Thr or Trp
  MOD_RES (35)...(35): Xaa = Ala, Asp, Glu, His, Ile, Lys, Leu, Met, Asn, Pro, Gln, Arg or Ser
  MOD_RES (36)...(36): Xaa = Ala, Asp, Glu, Gly, His, Ile, Lys, Leu, Gln, Ser, Thr, Val or Tyr
  MOD_RES (37)...(37): Xaa = Ala, Glu, His, Ile, Leu, Met, Asn, Pro, Gln, Arg, Thr, Val or Tyr
CXXXXXXXCXXXXCXXXXXXCBXXXXCXXXXDEXXXC

SEQ ID NO: 226 - protein, 36 aa, Artificial Sequence
  LDL receptor class A domain monomer sequence
  MOD_RES (2)...(2): Xaa = Ala, Asp, Glu, Phe, Gly, His, Lys, Leu, Met, Asn, Pro, Gln, Arg, Ser, Thr or Val
  MOD_RES (3)...(3): Xaa = Ala, Cys, Asp, Glu, Gly, His, Ile, Lys, Leu, Met, Asn, Pro, Gln, Arg, Ser, Thr, Val, Trp or Tyr
  MOD_RES (4)...(4): Xaa = Ala, Asp, Glu, Phe, Gly, His, Lys, Asn, Pro, Gln, Arg, Ser, Thr, Val, Trp or Tyr
  MOD_RES (5)...(5): Xaa = Ala, Asp, Glu, Phe, Gly, His, Lys, Leu, Met, Asn, Gln, Arg, Ser, Thr or Tyr
  MOD_RES (6)...(6): Xaa = Ala, Phe, His, Ile, Lys, Leu, Met, Gln, Arg, Ser, Thr, Val, Trp or Tyr
  MOD_RES (7)...(7): Xaa = Ala, Glu, Phe, His, Ile, Lys, Leu, Met, Asn, Pro, Gln, Arg, Ser, Thr or Val
  MOD_RES (9)...(9): Xaa = Ala, Asp, Glu, Gly, His, Lys, Leu, Asn, Pro, Gln, Arg, Ser, Thr, Val or Trp
  MOD_RES (10)...(10): Xaa = Asp, Glu, Gly, Ile, Lys, Leu, Asn, Pro, Gln, Arg, Ser, Thr or Val
  MOD_RES (11)...(11): Xaa = Ala, Asp, Glu, Gly, His, Ile, Lys, Asn, Pro, Gln, Arg, Ser, Thr or Tyr
  MOD_RES (12)...(12): Xaa = Ala, Asp, Glu, Phe, Gly, His, Ile, Lys, Leu, Asn, Pro, Gln, Arg, Ser, Thr, Val, Trp or Tyr
  MOD_RES (13)...(13): Xaa = Ala, Asp, Glu, Gly, His, Ile, Lys, Leu, Met, Asn, Gln, Arg, Thr or Val
  MOD_RES (15)...(15): Xaa = Ala, Phe, Ile, Lys, Leu, Thr, Val or Tyr
  MOD_RES (16)...(16): Xaa = Ala, Asp, Glu, Phe, Gly, His, Lys, Leu, Met, Asn, Pro, Gln, Arg, Ser, Thr, Val, Trp or Tyr
  MOD_RES (17)...(17): Xaa = Ala, Asp, Glu, Phe, Gly, His, Ile, Lys, Leu, Met, Asn, Pro, Gln, Arg, Ser, Thr, Val, or Tyr
  MOD_RES (18)...(18): Xaa = Ala, Asp, Glu, Phe, Gly, His, Ile, Lys, Leu, Met, Asn, Pro, Gln, Arg, Ser, Thr, Val, Trp or Tyr
  MOD_RES (19)...(19): Xaa = Ala, Asp, Glu, Phe, Gly, Lys, Leu, Met, Asn, Gln, Arg, Ser, Thr, Val, Trp or Tyr
  MOD_RES (20)...(20): Xaa = Ala, Glu, Phe, His, Ile, Lys, Leu, Met, Pro, Gln, Arg, Thr, Val, Trp or Tyr
  MOD_RES (23)...(23): Xaa = Ala, Asp, Glu, Phe, Gly, His, Lys, Leu, Met, Asn, Gln, Arg, Ser, Thr, Val, Trp or Tyr
  MOD_RES (24)...(24): Xaa = Ala, Asp, Glu, Phe, Gly, His, Ile, Lys, Leu, Met, Asn, Gln, Arg, Ser, Thr, Val, Trp or Tyr
  MOD_RES (25)...(25): Xaa = Ala, Asp, Glu, Phe, His, Ile, Lys, Leu, Asn, Pro, Gln, Arg, Ser, Thr, Val, Trp or Tyr
  MOD_RES (26)...(26): Xaa = Asp, Glu, His, Asn, Gln, Ser or Thr
  MOD_RES (28)...(28): Xaa = Ala, Asp, Glu, Gly, His, Ile, Lys, Leu, Met, Pro, Gln, Arg, Ser, Thr or Val
  MOD_RES (29)...(29): Xaa = Asp, Gly, His, Asn, Gln, Ser, Thr or Tyr
  MOD_RES (30)...(30): Xaa = Ala, Asp, Glu, Phe, Gly, His, Lys, Leu, Met, Asn, Gln, Arg, Ser, Trp or Tyr
  MOD_RES (31)...(31): Xaa = Ala, Glu, Gly, Leu, Met, Arg, Ser or Thr
  MOD_RES (34)...(34): Xaa = Ala, Asp, Glu, Phe, Gly, His, Ile, Lys, Leu, Met, Asn, Gln, Arg, Ser, Thr, Val, Trp or Tyr
  MOD_RES (35)...(35): Xaa = Ala, Asp, Glu, Phe, Gly, His, Ile, Lys, Leu, Met, Asn, Pro, Gln, Arg or Ser
CXXXXXXCXXXXXCXXXXXXCBXXXXCXXXXDEXXC

SEQ ID NO: 227 - protein, 37 aa, Artificial Sequence
  LDL receptor class A domain monomer sequence
  MOD_RES (2)...(2): Xaa = Ala, Asp, Glu, Phe, Gly, His, Lys, Leu, Met, Asn, Pro, Gln, Arg, Ser, Thr or Val
  MOD_RES (3)...(3): Xaa = Ala, Cys, Asp, Glu, Gly, His, Ile, Lys, Leu, Met, Asn, Pro, Gln, Arg, Ser, Thr, Val, Trp or Tyr
  MOD_RES (4)...(4): Xaa = Ala, Asp, Glu, Phe, Gly, His, Lys, Asn, Pro, Gln, Arg, Ser, Thr, Val, Trp or Tyr
  MOD_RES (5)...(5): Xaa = Ala, Asp, Glu, Phe, Gly, His, Lys, Leu, Met, Asn, Gln, Arg, Ser, Thr or Tyr
  MOD_RES (6)...(6): Xaa = Ala, Phe, His, Ile, Lys, Leu, Met, Gln, Arg, Ser, Thr, Val, Trp or Tyr
  MOD_RES (7)...(7): Xaa = Ala, Glu, Phe, His, Ile, Lys, Leu, Met, Asn, Pro, Gln, Arg, Ser, Thr or Val
  MOD_RES (9)...(9): Xaa = Ala, Asp, Glu, Gly, His, Lys, Leu, Asn, Pro, Gln, Arg, Ser, Thr, Val or Trp
  MOD_RES (10)...(10): Xaa = Asp, Glu, Gly, Ile, Lys, Leu, Asn, Pro, Gln, Arg, Ser, Thr or Val
  MOD_RES (11)...(11): Xaa = Ala, Asp, Glu, Gly, His, Ile, Lys, Asn, Pro, Gln, Arg, Ser, Thr or Tyr
  MOD_RES (12)...(12): Xaa = Ala, Asp, Glu, Phe, Gly, His, Ile, Lys, Leu, Asn, Pro, Gln, Arg, Ser, Thr, Val, Trp or Tyr
  MOD_RES (13)...(13): Xaa = Ala, Asp, Glu, Gly, His, Ile, Lys, Leu, Met, Asn, Gln, Arg, Thr or Val
  MOD_RES (15)...(15): Xaa = Ala, Phe, Ile, Lys, Leu, Thr, Val or Tyr
  MOD_RES (16)...(16): Xaa = Ala, Asp, Glu, Phe, Gly, His, Lys, Leu, Met, Asn, Pro, Gln, Arg, Ser, Thr, Val, Trp or Tyr
  MOD_RES (17)...(17): Xaa = Ala, Asp, Glu, Phe, Gly, His, Ile, Lys, Leu, Met, Asn, Pro, Gln, Arg, Ser, Thr, Val, or Tyr
  MOD_RES (18)...(18): Xaa = Ala, Asp, Glu, Phe, Gly, His, Ile, Lys, Leu, Met, Asn, Pro, Gln, Arg, Ser, Thr, Val, Trp or Tyr
  MOD_RES (19)...(19): Xaa = Ala, Asp, Glu, Phe, Gly, Lys, Leu, Met, Asn, Gln, Arg, Ser, Thr, Val, Trp or Tyr
  MOD_RES (20)...(20): Xaa = Ala, Glu, Phe, His, Ile, Lys, Leu, Met, Pro, Gln, Arg, Thr, Val, Trp or Tyr
  MOD_RES (23)...(23): Xaa = Ala, Asp, Glu, Phe, Gly, His, Lys, Leu, Met, Asn, Gln, Arg, Ser, Thr, Val, Trp or Tyr
  MOD_RES (24)...(24): Xaa = Ala, Asp, Glu, Phe, Gly, His, Ile, Lys, Leu, Met, Asn, Gln, Arg, Ser, Thr, Val, Trp or Tyr
  MOD_RES (25)...(25): Xaa = Ala, Asp, Glu, Phe, His, Ile, Lys, Leu, Asn, Pro, Gln, Arg, Ser, Thr, Val, Trp or Tyr
  MOD_RES (26)...(26): Xaa = Asp, Glu, His, Asn, Gln, Ser or Thr
  MOD_RES (28)...(28): Xaa = Ala, Asp, Phe, Gly, Leu, Met, Pro, Ser, Thr or Val
  MOD_RES (30)...(30): Xaa = Ala, Gly, His, Gln or Arg
  MOD_RES (31)...(31): Xaa = Ser, Thr or Tyr
  MOD_RES (34)...(34): Xaa = Ala, Glu, Gly, His, Leu, Met, Asn, Pro, Arg or Ser
  MOD_RES (35)...(35): Xaa = Ala, Asp, Glu, Gly, Asn, Pro, Gln, Val or Tyr
  MOD_RES (36)...(36): Xaa = Ala, Asp, Glu, His, Leu, Asn, Gln or Ser
CXXXXXXCXXXXXCXXXXXXCBXXXXCXBXXDEXXXC

SEQ ID NO: 228 - protein, 38 aa, Artificial Sequence
  LDL receptor class A domain monomer sequence
  MOD_RES (2)...(2): Xaa = Ala, Asp, Glu, Phe, Gly, His, Lys, Leu, Met, Asn, Pro, Gln, Arg, Ser, Thr or Val
  MOD_RES (3)...(3): Xaa = Ala, Cys, Asp, Glu, Gly, His, Ile, Lys, Leu, Met, Asn, Pro, Gln, Arg, Ser, Thr, Val, Trp or Tyr
  MOD_RES (4)...(4): Xaa = Ala, Asp, Glu, Phe, Gly, His, Lys, Asn, Pro, Gln, Arg, Ser, Thr, Val, Trp or Tyr
  MOD_RES (5)...(5): Xaa = Ala, Asp, Glu, Phe, Gly, His, Lys, Leu, Met, Asn, Gln, Arg, Ser, Thr or Tyr
  MOD_RES (6)...(6): Xaa = Ala, Phe, His, Ile, Lys, Leu, Met, Gln, Arg, Ser, Thr, Val, Trp or Tyr
  MOD_RES (7)...(7): Xaa = Ala, Glu, Phe, His, Ile, Lys, Leu, Met, Asn, Pro, Gln, Arg, Ser, Thr or Val
  MOD_RES (9)...(9): Xaa = Ala, Asp, Glu, Gly, His, Lys, Leu, Asn, Pro, Gln, Arg, Ser, Thr, Val or Trp
  MOD_RES (10)...(10): Xaa = Asp, Glu, Gly, Ile, Lys, Leu, Asn, Pro, Gln, Arg, Ser, Thr or Val
  MOD_RES (11)...(11): Xaa = Ala, Asp, Glu, Gly, His, Ile, Lys, Asn, Pro, Gln, Arg, Ser, Thr or Tyr
  MOD_RES (12)...(12): Xaa = Ala, Asp, Glu, Phe, Gly, His, Ile, Lys, Leu, Asn, Pro, Gln, Arg, Ser, Thr, Val, Trp or Tyr
  MOD_RES (13)...(13): Xaa = Ala, Asp, Glu, Gly, His, Ile, Lys, Leu, Met, Asn, Gln, Arg, Thr or Val
  MOD_RES (15)...(15): Xaa = Ala, Phe, Ile, Lys, Leu, Thr, Val or Tyr
  MOD_RES (16)...(16): Xaa = Ala, Asp, Glu, Phe, Gly, His, Lys, Leu, Met, Asn, Pro, Gln, Arg, Ser, Thr, Val, Trp or Tyr
  MOD_RES (17)...(17): Xaa = Ala, Asp, Glu, Phe, Gly, His, Ile, Lys, Leu, Met, Asn, Pro, Gln, Arg, Ser, Thr, Val, or Tyr
  MOD_RES (18)...(18): Xaa = Ala, Asp, Glu, Phe, Gly, His, Ile, Lys, Leu, Met, Asn, Pro, Gln, Arg, Ser, Thr, Val, Trp or Tyr
  MOD_RES (19)...(19): Xaa = Ala, Asp, Glu, Phe, Gly, Lys, Leu, Met, Asn, Gln, Arg, Ser, Thr, Val, Trp or Tyr
  MOD_RES (20)...(20): Xaa = Ala, Glu, Phe, His, Ile, Lys, Leu, Met, Pro, Gln, Arg, Thr, Val, Trp or Tyr
  MOD_RES (23)...(23): Xaa = Ala, Asp, Glu, Phe, Gly, His, Lys, Leu, Met, Asn, Gln, Arg, Ser, Thr, Val, Trp or Tyr
  MOD_RES (24)...(24): Xaa = Ala, Asp, Glu, Phe, Gly, His, Ile, Lys, Leu, Met, Asn, Gln, Arg, Ser, Thr, Val, Trp or Tyr
  MOD_RES (25)...(25): Xaa = Ala, Asp, Glu, Phe, His, Ile, Lys, Leu, Asn, Pro, Gln, Arg, Ser, Thr, Val, Trp or Tyr
  MOD_RES (26)...(26): Xaa = Asp, Glu, His, Asn, Gln, Ser or Thr
  MOD_RES (28)...(28): Xaa = Glu, Gly, Lys, Leu, Pro, Gln, Arg or Ser
  MOD_RES (29)...(29): Xaa = Asp, Asn or Ser
  MOD_RES (30)...(30): Xaa = Asp, Phe, Gly, His, Lys, Asn, Gln, Arg, Ser, Trp or Tyr
  MOD_RES (31)...(31): Xaa = Ala, Glu, Leu, Ser or Thr
  MOD_RES (34)...(34): Xaa = Ala, Asp, Glu, Gly, Lys, Leu, Met, Asn, Pro, Ser, Thr or Trp
  MOD_RES (35)...(35): Xaa = Ala, Asp, Glu, His, Ile, Lys, Leu, Met, Asn, Pro, Gln, Arg or Ser
  MOD_RES (36)...(36): Xaa = Ala, Asp, Glu, Gly, His, Ile, Lys, Leu, Gln, Ser, Thr, Val or Tyr
  MOD_RES (37)...(37): Xaa = Ala, Glu, His, Ile, Leu, Met, Asn, Pro, Gln, Arg, Thr, Val or Tyr
CXXXXXXCXXXXXCXXXXXXCBXXXXCXXXXDEXXXXC

SEQ ID NO: 229 - protein, 37 aa, Artificial Sequence
  LDL receptor class A domain monomer sequence
  MOD_RES (2)...(2): Xaa = Ala, Asp, Glu, Phe, Gly, His, Lys, Leu, Asn, Pro, Arg, Ser or Thr
  MOD_RES (3)...(3): Xaa = Ala, Asp, Glu, Gly, His, Leu, Asn, Pro, Arg, Ser or Thr
  MOD_RES (4)...(4): Xaa = Asp, Phe, Gly, Lys, Leu, Asn, Pro, Gln, Arg, Ser, Thr, Val or Tyr
  MOD_RES (5)...(5): Xaa = Asp, Glu, Phe, Gly, His, Lys, Met, Asn, Arg, Ser, Thr or Val
  MOD_RES (6)...(6): Xaa = Asp, Glu, Gly, Lys, Leu, Asn, Pro, Gln or Arg
  MOD_RES (7)...(7): Xaa = Phe, His, Leu, Val or Trp
  MOD_RES (8)...(8): Xaa = Ala, Glu, Gly, Lys, Leu, Met, Arg, Ser, Thr or Val
  MOD_RES (10)...(10): Xaa = Ala, Asp, Glu, Gly, His, Lys, Leu, Asn, Pro, Gln, Arg, Ser, Thr, Val or Trp
  MOD_RES (11)...(11): Xaa = Asp, Glu, Gly, Ile, Lys, Leu, Asn, Pro, Gln, Arg, Ser, Thr or Val
  MOD_RES (12)...(12): Xaa = Ala, Asp, Glu, Gly, His, Ile, Lys, Asn, Pro, Gln, Arg, Ser, Thr or Tyr
  MOD_RES (13)...(13): Xaa = Ala, Asp, Glu, Phe, Gly, His, Ile, Lys, Leu, Asn, Pro, Gln, Arg, Ser, Thr, Val, Trp or Tyr
  MOD_RES (14)...(14): Xaa = Ala, Asp, Glu, Gly, His, Ile, Lys, Leu, Met, Asn, Gln, Arg, Thr or Val
  MOD_RES (16)...(16): Xaa = Ala, Phe, Ile, Lys, Leu, Thr, Val or Tyr
  MOD_RES (17)...(17): Xaa = Ala, Asp, Glu, Phe, Gly, His, Lys, Leu, Met, Asn, Pro, Gln, Arg, Ser, Thr, Val, Trp or Tyr
  MOD_RES (18)...(18): Xaa = Ala, Asp, Glu, Phe, Gly, His, Ile, Lys, Leu, Met, Asn, Pro, Gln, Arg, Ser, Thr, Val, or Tyr
  MOD_RES (19)...(19): Xaa = Ala, Asp, Glu, Phe, Gly, His, Ile, Lys, Leu, Met, Asn, Pro, Gln, Arg, Ser, Thr, Val, Trp or Tyr
  MOD_RES (20)...(20): Xaa = Ala, Asp, Glu, Phe, Gly, Lys, Leu, Met, Asn, Gln, Arg, Ser, Thr, Val, Trp or Tyr
  MOD_RES (21)...(21): Xaa = Ala, Glu, Phe, His, Ile, Lys, Leu, Met, Pro, Gln, Arg, Thr, Val, Trp or Tyr
  MOD_RES (24)...(24): Xaa = Ala, Asp, Glu, Phe, Gly, His, Lys, Leu, Met, Asn, Gln, Arg, Ser, Thr, Val, Trp or Tyr
  MOD_RES (25)...(25): Xaa = Ala, Asp, Glu, Phe, Gly, His, Ile, Lys, Leu, Met, Asn, Gln, Arg, Ser, Thr, Val, Trp or Tyr
  MOD_RES (26)...(26): Xaa = Ala, Asp, Glu, Phe, His, Ile, Lys, Leu, Asn, Pro, Gln, Arg, Ser, Thr, Val, Trp or Tyr
  MOD_RES (27)...(27): Xaa = Asp, Glu, His, Asn, Gln, Ser or Thr
  MOD_RES (29)...(29): Xaa = Ala, Asp, Glu, Gly, His, Ile, Lys, Leu, Met, Pro, Gln, Arg, Ser, Thr or Val
  MOD_RES (30)...(30): Xaa = Asp, Gly, His, Asn, Gln, Ser, Thr or Tyr
  MOD_RES (31)...(31): Xaa = Ala, Asp, Glu, Phe, Gly, His, Lys, Leu, Met, Asn, Gln, Arg, Ser, Trp or Tyr
  MOD_RES (32)...(32): Xaa = Ala, Glu, Gly, Leu, Met, Arg, Ser or Thr
  MOD_RES (35)...(35): Xaa = Ala, Asp, Glu, Phe, Gly, His, Ile, Lys, Leu, Met, Asn, Gln, Arg, Ser, Thr, Val, Trp or Tyr
  MOD_RES (36)...(36): Xaa = Ala, Asp, Glu, Phe, Gly, His, Ile, Lys, Leu, Met, Asn, Pro, Gln, Arg or Ser
CXXXXXXXCXXXXXCXXXXXXCBXXXXCXXXXDEXXC

SEQ ID NO: 230 - protein, 38 aa, Artificial Sequence
  LDL receptor class A domain monomer sequence
  MOD_RES (2)...(2): Xaa = Ala, Asp, Glu, Phe, Gly, His, Lys, Leu, Asn, Pro, Arg, Ser or Thr
  MOD_RES (3)...(3): Xaa = Ala, Asp, Glu, Gly, His, Leu, Asn, Pro, Arg, Ser or Thr
  MOD_RES (4)...(4): Xaa = Asp, Phe, Gly, Lys, Leu, Asn, Pro, Gln, Arg, Ser, Thr, Val or Tyr
  MOD_RES (5)...(5): Xaa = Asp, Glu, Phe, Gly, His, Lys, Met, Asn, Arg, Ser, Thr or Val
  MOD_RES (6)...(6): Xaa = Asp, Glu, Gly, Lys, Leu, Asn, Pro, Gln or Arg
  MOD_RES (7)...(7): Xaa = Phe, His, Leu, Val or Trp
  MOD_RES (8)...(8): Xaa = Ala, Glu, Gly, Lys, Leu, Met, Arg, Ser, Thr or Val
  MOD_RES (10)...(10): Xaa = Ala, Asp, Glu, Gly, His, Lys, Leu, Asn, Pro, Gln, Arg, Ser, Thr, Val or Trp
  MOD_RES (11)...(11): Xaa = Asp, Glu, Gly, Ile, Lys, Leu, Asn, Pro, Gln, Arg, Ser, Thr or Val
  MOD_RES (12)...(12): Xaa = Ala, Asp, Glu, Gly, His, Ile, Lys, Asn, Pro, Gln, Arg, Ser, Thr or Tyr
  MOD_RES (13)...(13): Xaa = Ala, Asp, Glu, Phe, Gly, His, Ile, Lys, Leu, Asn, Pro, Gln, Arg, Ser, Thr, Val, Trp or Tyr
  MOD_RES (14)...(14): Xaa = Ala, Asp, Glu, Gly, His, Ile, Lys, Leu, Met, Asn, Gln, Arg, Thr or Val
  MOD_RES (16)...(16): Xaa = Ala, Phe, Ile, Lys, Leu, Thr, Val or Tyr
  MOD_RES (17)...(17): Xaa = Ala, Asp, Glu, Phe, Gly, His, Lys, Leu, Met, Asn, Pro, Gln, Arg, Ser, Thr, Val, Trp or Tyr
  MOD_RES (18)...(18): Xaa = Ala, Asp, Glu, Phe, Gly, His, Ile, Lys, Leu, Met, Asn, Pro, Gln, Arg, Ser, Thr, Val, or Tyr
  MOD_RES (19)...(19): Xaa = Ala, Asp, Glu, Phe, Gly, His, Ile, Lys, Leu, Met, Asn, Pro, Gln, Arg, Ser, Thr, Val, Trp or Tyr
  MOD_RES (20)...(20): Xaa = Ala, Asp, Glu, Phe, Gly, Lys, Leu, Met, Asn, Gln, Arg, Ser, Thr, Val, Trp or Tyr
  MOD_RES (21)...(21): Xaa = Ala, Glu, Phe, His, Ile, Lys, Leu, Met, Pro, Gln, Arg, Thr, Val, Trp or Tyr
  MOD_RES (24)...(24): Xaa = Ala, Asp, Glu, Phe, Gly, His, Lys, Leu, Met, Asn, Gln, Arg, Ser, Thr, Val, Trp or Tyr
  MOD_RES (25)...(25): Xaa = Ala, Asp, Glu, Phe, Gly, His, Ile, Lys, Leu, Met, Asn, Gln, Arg, Ser, Thr, Val, Trp or Tyr
  MOD_RES (26)...(26): Xaa = Ala, Asp, Glu, Phe, His, Ile, Lys, Leu, Asn, Pro, Gln, Arg, Ser, Thr, Val, Trp or Tyr
  MOD_RES (27)...(27): Xaa = Asp, Glu, His, Asn, Gln, Ser or Thr
  MOD_RES (29)...(29): Xaa = Ala, Asp, Phe, Gly, Leu, Met, Pro, Ser, Thr or Val
  MOD_RES (31)...(31): Xaa = Ala, Gly, His, Gln or Arg
  MOD_RES (32)...(32): Xaa = Ser, Thr or Tyr
  MOD_RES (35)...(35): Xaa = Ala, Glu, Gly, His, Leu, Met, Asn, Pro, Arg or Ser
  MOD_RES (36)...(36): Xaa = Ala, Asp, Glu, Gly, Asn, Pro, Gln, Val or Tyr
  MOD_RES (37)...(37): Xaa = Ala, Asp, Glu, His, Leu, Asn, Gln or Ser
CXXXXXXXCXXXXXCXXXXXXCBXXXXCXBXXDEXXXC

SEQ ID NO: 231 - protein, 39 aa, Artificial Sequence
  LDL receptor class A domain monomer sequence
  MOD_RES (2)...(2): Xaa = Ala, Asp, Glu, Phe, Gly, His, Lys, Leu, Asn, Pro, Arg, Ser or Thr
  MOD_RES (3)...(3): Xaa = Ala, Asp, Glu, Gly, His, Leu, Asn, Pro, Arg, Ser or Thr
  MOD_RES (4)...(4): Xaa = Asp, Phe, Gly, Lys, Leu, Asn, Pro, Gln, Arg, Ser, Thr, Val or Tyr
  MOD_RES (5)...(5): Xaa = Asp, Glu, Phe, Gly, His, Lys, Met, Asn, Arg, Ser, Thr or Val
  MOD_RES (6)...(6): Xaa = Asp, Glu, Gly, Lys, Leu, Asn, Pro, Gln or Arg
  MOD_RES (7)...(7): Xaa = Phe, His, Leu, Val or Trp
  MOD_RES (8)...(8): Xaa = Ala, Glu, Gly, Lys, Leu, Met, Arg, Ser, Thr or Val
  MOD_RES (10)...(10): Xaa = Ala, Asp, Glu, Gly, His, Lys, Leu, Asn, Pro, Gln, Arg, Ser, Thr, Val or Trp
  MOD_RES (11)...(11): Xaa = Asp, Glu, Gly, Ile, Lys, Leu, Asn, Pro, Gln, Arg, Ser, Thr or Val
  MOD_RES (12)...(12): Xaa = Ala, Asp, Glu, Gly, His, Ile, Lys, Asn, Pro, Gln, Arg, Ser, Thr or Tyr
  MOD_RES (13)...(13): Xaa = Ala, Asp, Glu, Phe, Gly, His, Ile, Lys, Leu, Asn, Pro, Gln, Arg, Ser, Thr, Val, Trp or Tyr
  MOD_RES (14)...(14): Xaa = Ala, Asp, Glu, Gly, His, Ile, Lys, Leu, Met, Asn, Gln, Arg, Thr or Val
  MOD_RES (16)...(16): Xaa = Ala, Phe, Ile, Lys, Leu, Thr, Val or Tyr
  MOD_RES (17)...(17): Xaa = Ala, Asp, Glu, Phe, Gly, His, Lys, Leu, Met, Asn, Pro, Gln, Arg, Ser, Thr, Val, Trp or Tyr
  MOD_RES (18)...(18): Xaa = Ala, Asp, Glu, Phe, Gly, His, Ile, Lys, Leu, Met, Asn, Pro, Gln, Arg, Ser, Thr, Val, or Tyr
  MOD_RES (19)...(19): Xaa = Ala, Asp, Glu, Phe, Gly, His, Ile, Lys, Leu, Met, Asn, Pro, Gln, Arg, Ser, Thr, Val, Trp or Tyr
  MOD_RES (20)...(20): Xaa = Ala, Asp, Glu, Phe, Gly, Lys, Leu, Met, Asn, Gln, Arg, Ser, Thr, Val, Trp or Tyr
  MOD_RES (21)...(21): Xaa = Ala, Glu, Phe, His, Ile, Lys, Leu, Met, Pro, Gln, Arg, Thr, Val, Trp or Tyr
  MOD_RES (24)...(24): Xaa = Ala, Asp, Glu, Phe, Gly, His, Lys, Leu, Met, Asn, Gln, Arg, Ser, Thr, Val, Trp or Tyr
  MOD_RES (25)...(25): Xaa = Ala, Asp, Glu, Phe, Gly, His, Ile, Lys, Leu, Met, Asn, Gln, Arg, Ser, Thr, Val, Trp or Tyr
  MOD_RES (26)...(26): Xaa = Ala, Asp, Glu, Phe, His, Ile, Lys, Leu, Asn, Pro, Gln, Arg, Ser, Thr, Val, Trp or Tyr
  MOD_RES (27)...(27): Xaa = Asp, Glu, His, Asn, Gln, Ser or Thr
  MOD_RES (29)...(29): Xaa = Glu, Gly, Lys, Leu, Pro, Gln, Arg or Ser
  MOD_RES (30)...(30): Xaa = Asp, Asn or Ser
  MOD_RES (31)...(31): Xaa = Asp, Phe, Gly, His, Lys, Asn, Gln, Arg, Ser, Trp or Tyr
  MOD_RES (32)...(32): Xaa = Ala, Glu, Leu, Ser or Thr
  MOD_RES (35)...(35): Xaa = Ala, Asp, Glu, Gly, Lys, Leu, Met, Asn, Pro, Ser, Thr or Trp
  MOD_RES (36)...(36): Xaa = Ala, Asp, Glu, His, Ile, Lys, Leu, Met, Asn, Pro, Gln, Arg or Ser
  MOD_RES (37)...(37): Xaa = Ala, Asp, Glu, Gly, His, Ile, Lys, Leu, Gln, Ser, Thr, Val or Tyr
  MOD_RES (38)...(38): Xaa = Ala, Glu, His, Ile, Leu, Met, Asn, Pro, Gln, Arg, Thr, Val or Tyr
CXXXXXXXCXXXXXCXXXXXXCBXXXXCXXXXDEXXXXC

SEQ ID NO: 232 - protein, 68 aa, Artificial Sequence
  EGF domain monomer sequence
  MOD_RES (2)...(15): Xaa = any amino acid, Xaa at positions 5-15 may be present or absent
  MOD_RES (17)...(23): Xaa = any amino acid, Xaa at positions 20-23 may be present or absent
  MOD_RES (25)...(40): Xaa = any amino acid, Xaa at positions 29-40 may be present or absent
  MOD_RES (42)...(43): Xaa = any amino acid, Xaa at position 43 may be present or absent
  MOD_RES (45)...(67): Xaa = any amino acid, Xaa at positions 53-67 may be present or absent
  DISULFID (1)...(24)
  DISULFID (16)...(44)
  DISULFID (41)...(68)
CXXXXXXXXXXXXXXCXXXXXXXCXXXXXXXXXXXXXXXXCXXCXXXXXXXXXXXXXXXXXXXXXXXC

SEQ ID NO: 233 - protein, 30 aa, Artificial Sequence
  EGF domain monomer sequence
  MOD_RES (2)...(2): Xaa = Ala, Asp, Glu, Phe, Gly, His, Ile, Lys, Leu, Asn, Pro, Gln, Arg, Ser, Thr, Val or Trp
  MOD_RES (3)...(3): Xaa = Ala, Asp, Glu, Gly, His, Lys, Leu, Met, Asn, Pro, Arg, Ser, Thr or Tyr
  MOD_RES (4)...(4): Xaa = Ala, Asp, Glu, Gly, His, Lys, Leu, Met, Asn, Pro, Gln, Arg, Ser, Thr, Val or Trp
  MOD_RES (5)...(5): Xaa = Ala, Glu, Gly, Met, Asn, Pro, Gln, Arg, Ser, Thr or Tyr
  MOD_RES (7)...(7): Xaa = Ala, Asp, Glu, Gly, His, Lys, Asn, Pro, Gln, Ser, Thr or Val
  MOD_RES (8)...(8): Xaa = Phe, Gly, His, Leu, Asn, Gln, Ser, Thr or Tyr
  MOD_RES (9)...(9): Xaa = Ala, Asp, Glu, Phe, Gly, His, Ile, Lys, Leu, Asn, Gln, Arg, Ser, Thr, Val or Tyr
  MOD_RES (11)...(11): Xaa = Ala, Asp, Glu, Phe, Gly, His, Ile, Lys, Leu, Met, Asn, Gln, Arg, Ser, Thr, Val, Trp or Tyr
  MOD_RES (12)...(12): Xaa = Ala, Asp, Glu, Lys, Leu, Asn, Pro, Gln, Arg, Ser, Thr or Val
  MOD_RES (13)...(13): Xaa = Ala, Cys, Asp, Glu, Phe, Gly, His, Ile, Lys, Leu, Met, Asn, Pro, Gln, Arg, Ser, Thr, Val or Tyr
  MOD_RES (14)...(14): Xaa = Ala, Asp, Glu, Phe, Gly, His, Ile, Lys, Leu, Met, Asn, Pro, Gln, Arg, Ser, Thr, Val, Trp or Tyr
  MOD_RES (15)...(15): Xaa = Ala, Asp, Glu, Phe, Gly, His, Ile, Lys, Leu, Asn, Pro, Gln, Arg, Ser, Thr, Val or Trp
  MOD_RES (16)...(16): Xaa = Ala, Asp, Glu, Gly, His, Lys, Leu, Met, Asn, Gln, Arg, Ser, Thr, Val, Trp or Tyr
  MOD_RES (17)...(17): Xaa = Ala, Phe, His, Ile, Leu, Pro, Arg, Thr, Val or Tyr
  MOD_RES (18)...(18): Xaa = Ala, Asp, Glu, Phe, His, Ile, Lys, Leu, Met, Asn, Gln, Arg, Ser, Thr, Val, Trp or Tyr
  MOD_RES (20)...(20): Xaa = Ala, Asp, Glu, Phe, Gly, His, Ile, Lys, Leu, Met, Asn, Pro, Gln, Arg, Ser, Thr, Val, Trp or Tyr
  MOD_RES (22)...(22): Xaa = Ala, Asp, Glu, Phe, His, Lys, Leu, Met, Asn, Pro, Gln, Arg, Ser, Thr, Val, Trp or Tyr
  MOD_RES (23)...(23): Xaa = Ala, Asp, Glu, Phe, Gly, His, Lys, Leu, Asn, Pro, Gln, Arg, Ser, Thr, Val or Tyr
  MOD_RES (24)...(24): Xaa = Ala, Glu, Gly, His, Lys, Leu, Asn, Pro, Arg, Ser, Thr or Tyr
  MOD_RES (25)...(25): Xaa = Phe, His, Ile, Leu, Met, Arg, Thr, Trp or Tyr
  MOD_RES (26)...(26): Xaa = Ala, Asp, Glu, Phe, Gly, His, Ile, Lys, Leu, Met, Asn, Gln, Arg, Ser, Thr, Val or Tyr
  MOD_RES (27)...(27): Xaa = Asp, Gly or Ser
  MOD_RES (28)...(28): Xaa = Ala, Asp, Glu, Phe, His, Ile, Lys, Leu, Asn, Pro, Gln, Arg, Ser, Thr, Val or Tyr
  MOD_RES (29)...(29): Xaa = Ala, Asp, Glu, Phe, His, Ile, Lys, Leu, Met, Asn, Gln, Arg, Ser, Thr or Tyr
CXXXXCXXXCXXXXXXXXCXCXXXXXXXXC

SEQ ID NO: 234 - protein, 31 aa, Artificial Sequence
  EGF domain monomer sequence
  MOD_RES (2)...(2): Xaa = Ala, Asp, Glu, Phe, Gly, His, Ile, Lys, Leu, Asn, Pro, Gln, Arg, Ser, Thr, Val or Trp
  MOD_RES (3)...(3): Xaa = Ala, Asp, Glu, Gly, His, Lys, Leu, Met, Asn, Pro, Arg, Ser, Thr or Tyr
  MOD_RES (4)...(4): Xaa = Ala, Asp, Glu, Gly, His, Lys, Leu, Met, Asn, Pro, Gln, Arg, Ser, Thr, Val or Trp
  MOD_RES (5)...(5): Xaa = Ala, Glu, Gly, Met, Asn, Pro, Gln, Arg, Ser, Thr or Tyr
  MOD_RES (7)...(7): Xaa = Ala, Asp, Glu, Gly, His, Lys, Asn, Pro, Gln, Ser, Thr or Val
  MOD_RES (8)...(8): Xaa = Phe, Gly, His, Leu, Asn, Gln, Ser, Thr or Tyr
  MOD_RES (9)...(9): Xaa = Ala, Asp, Glu, Phe, Gly, His, Ile, Lys, Leu, Asn, Gln, Arg, Ser, Thr, Val or Tyr
  MOD_RES (11)...(11): Xaa = Ala, Asp, Glu, Phe, Gly, His, Ile, Lys, Leu, Met, Asn, Gln, Arg, Ser, Thr, Val, Trp or Tyr
  MOD_RES (12)...(12): Xaa = Ala, Asp, Glu, Lys, Leu, Asn, Pro, Gln, Arg, Ser, Thr or Val
  MOD_RES (13)...(13): Xaa = Ala, Cys, Asp, Glu, Phe, Gly, His, Ile, Lys, Leu, Met, Asn, Pro, Gln, Arg, Ser, Thr, Val or Tyr
  MOD_RES (14)...(14): Xaa = Ala, Asp, Glu, Phe, Gly, His, Ile, Lys, Leu, Met, Asn, Pro, Gln, Arg, Ser, Thr, Val, Trp or Tyr
  MOD_RES (15)...(15): Xaa = Ala, Asp, Glu, Phe, Gly, His, Ile, Lys, Leu, Asn, Pro, Gln, Arg, Ser, Thr, Val or Trp
  MOD_RES (16)...(16): Xaa = Ala, Asp, Glu, Gly, His, Lys, Leu, Met, Asn, Gln, Arg, Ser, Thr, Val, Trp or Tyr
  MOD_RES (17)...(17): Xaa = Ala, Phe, His, Ile, Leu, Pro, Arg, Thr, Val or Tyr
  MOD_RES (18)...(18): Xaa = Ala, Asp, Glu, Phe, His, Ile, Lys, Leu, Met, Asn, Gln, Arg, Ser, Thr, Val, Trp or Tyr
  MOD_RES (20)...(20): Xaa = Ala, Asp, Glu, Phe, Gly, His, Ile, Lys, Leu, Met, Asn, Pro, Gln, Arg, Ser, Thr, Val, Trp or Tyr
  MOD_RES (22)...(22): Xaa = Ala, Asp, Glu, Phe, Gly, His, Ile, Lys, Leu, Asn, Pro, Gln, Arg, Ser, Thr, Val or Tyr
  MOD_RES (23)...(23): Xaa = Ala, Asp, Glu, Phe, His, Ile, Lys, Leu, Met, Asn, Pro, Gln, Arg, Ser, Thr or Val
  MOD_RES (24)...(24): Xaa = Asp, Glu, Gly, Asn, Pro or Ser
  MOD_RES (25)...(25): Xaa = Ala, Asp, Glu, Phe, His, Leu, Met, Gln, Arg, Ser, Thr, Trp or Tyr
  MOD_RES (26)...(26): Xaa = Ala, Asp, Glu, Phe, Gly, His, Ile, Lys, Leu, Met, Asn, Gln, Arg, Ser, Thr, Val or Tyr
  MOD_RES (27)...(27): Xaa = Ala, Phe, Gly, Ile, Lys, Leu, Met, Pro, Gln, Arg, Ser, Thr, Val, Trp or Tyr
  MOD_RES (28)...(28): Xaa = Ala, Asp, Glu, Phe, Gly, His, Lys, Leu, Met, Asn, Pro, Gln, Arg, Ser, Thr, Val or Trp
  MOD_RES (29)...(29): Xaa = Ala, Asp, Glu, Gly, Ile, Lys, Leu, Met, Asn, Pro, Gln, Arg, Ser, Thr, Val or Tyr
  MOD_RES (30)...(30): Xaa = Ala, Asp, Glu, Phe, Gly, His, Ile, Lys, Leu, Met, Asn, Gln, Ser, Thr or Val
CXXXXCXXXCXXXXXXXXCXCXXXXXXXXXC

SEQ ID NO: 235 - protein, 32 aa, Artificial Sequence
  EGF domain monomer sequence
  MOD_RES (2)...(2): Xaa = Ala, Asp, Glu, Phe, Gly, His, Ile, Lys, Leu, Asn, Pro, Gln, Arg, Ser, Thr, Val or Trp
  MOD_RES (3)...(3): Xaa = Ala, Asp, Glu, Gly, His, Lys, Leu, Met, Asn, Pro, Arg, Ser, Thr or Tyr
  MOD_RES (4)...(4): Xaa = Ala, Asp, Glu, Gly, His, Lys, Leu, Met, Asn, Pro, Gln, Arg, Ser, Thr, Val or Trp
  MOD_RES (5)...(5): Xaa = Ala, Glu, Gly, Met, Asn, Pro, Gln, Arg, Ser, Thr or Tyr
  MOD_RES (7)...(7): Xaa = Ala, Asp, Glu, Gly, His, Lys, Asn, Pro, Gln, Ser, Thr or Val
  MOD_RES (8)...(8): Xaa = Phe, Gly, His, Leu, Asn, Gln, Ser, Thr or Tyr
  MOD_RES (9)...(9): Xaa = Ala, Asp, Glu, Phe, Gly, His, Ile, Lys, Leu, Asn, Gln, Arg, Ser, Thr, Val or Tyr
  MOD_RES (11)...(11): Xaa = Ala, Asp, Glu, Phe, Gly, His, Ile, Lys, Leu, Met, Asn, Gln, Arg, Ser, Thr, Val, Trp or Tyr
  MOD_RES (12)...(12): Xaa = Ala, Asp, Glu, Lys, Leu, Asn, Pro, Gln, Arg, Ser, Thr or Val
  MOD_RES (13)...(13): Xaa = Ala, Cys, Asp, Glu, Phe, Gly, His, Ile, Lys, Leu, Met, Asn, Pro, Gln, Arg, Ser, Thr, Val or Tyr
  MOD_RES (14)...(14): Xaa = Ala, Asp, Glu, Phe, Gly, His, Ile, Lys, Leu, Met, Asn, Pro, Gln, Arg, Ser, Thr, Val, Trp or Tyr
  MOD_RES (15)...(15): Xaa = Ala, Asp, Glu, Phe, Gly, His, Ile, Lys, Leu, Asn, Pro, Gln, Arg, Ser, Thr, Val or Trp
  MOD_RES (16)...(16): Xaa = Ala, Asp, Glu, Gly, His, Lys, Leu, Met, Asn, Gln, Arg, Ser, Thr, Val, Trp or Tyr
  MOD_RES (17)...(17): Xaa = Ala, Phe, His, Ile, Leu, Pro, Arg, Thr, Val or Tyr
  MOD_RES (18)...(18): Xaa = Ala, Asp, Glu, Phe, His, Ile, Lys, Leu, Met, Asn, Gln, Arg, Ser, Thr, Val, Trp or Tyr
  MOD_RES (20)...(20): Xaa = Ala, Asp, Glu, Phe, Gly, His, Ile, Lys, Leu, Met, Asn, Pro, Gln, Arg, Ser, Thr, Val, Trp or Tyr
  MOD_RES (22)...(22): Xaa = Ala, Asp, Glu, Phe, Gly, His, Ile, Lys, Leu, Asn, Pro, Gln, Arg, Ser, Thr, Val or Tyr
  MOD_RES (23)...(23): Xaa = Ala, Asp, Glu, Phe, His, Ile, Lys, Leu, Met, Asn, Pro, Gln, Arg, Ser, Thr or Val
  MOD_RES (24)...(24): Xaa = Asp, Glu, Gly, Asn, Pro or Ser
  MOD_RES (25)...(25): Xaa = Ala, Asp, Glu, Phe, His, Leu, Met, Gln, Arg, Ser, Thr, Trp or Tyr
  MOD_RES (26)...(26): Xaa = Ala, Asp, Glu, Phe, Gly, His, Ile, Lys, Leu, Met, Asn, Gln, Arg, Ser, Thr, Val or Tyr
  MOD_RES (27)...(27): Xaa = Ala, Phe, Gly, Ile, Lys, Leu, Met, Pro, Gln, Arg, Ser, Thr, Val, Trp or Tyr
  MOD_RES (28)...(28): Xaa = Ala, Asp, Glu, Phe, Gly, His, Lys, Leu, Met, Asn, Pro, Gln, Arg, Ser, Thr, Val or Trp
  MOD_RES (29)...(29): Xaa = Ala, Asp, Glu, Gly, Ile, Lys, Leu, Met, Asn, Pro, Gln, Arg, Ser, Thr, Val or Tyr
  MOD_RES (30)...(30): Xaa = Ala, Asp, Glu, Phe, Gly, His, Ile, Lys, Leu, Met, Asn, Gln, Ser, Thr or Val
  MOD_RES (31)...(31): Xaa = Glu, Phe, Gly, His, Ile, Lys, Leu, Met, Asn, Pro, Gln, Arg, Ser, Thr or Trp
CXXXXCXXXCXXXXXXXXCXCXXXXXXXXXXC

SEQ ID NO: 236 - protein, 33 aa, Artificial Sequence
  EGF domain monomer sequence
  MOD_RES (2)...(2): Xaa = Ala, Asp, Glu, Phe, Gly, His, Ile, Lys, Leu, Asn, Pro, Gln, Arg, Ser, Thr, Val or Trp
  MOD_RES (3)...(3): Xaa = Ala, Asp, Glu, Gly, His, Lys, Leu, Met, Asn, Pro, Arg, Ser, Thr or Tyr
  MOD_RES (4)...(4): Xaa = Ala, Asp, Glu, Gly, His, Lys, Leu, Met, Asn, Pro, Gln, Arg, Ser, Thr, Val or Trp
  MOD_RES (5)...(5): Xaa = Ala, Glu, Gly, Met, Asn, Pro, Gln, Arg, Ser, Thr or Tyr
  MOD_RES (7)...(7): Xaa = Ala, Asp, Glu, Gly, His, Lys, Asn, Pro, Gln, Ser, Thr or Val
  MOD_RES (8)...(8): Xaa = Phe, Gly, His, Leu, Asn, Gln, Ser, Thr or Tyr
  MOD_RES (9)...(9): Xaa = Ala, Asp, Glu, Phe, Gly, His, Ile, Lys, Leu, Asn, Gln, Arg, Ser, Thr, Val or Tyr
  MOD_RES (11)...(11): Xaa = Ala, Asp, Glu, Phe, Gly, His, Ile, Lys, Leu, Met, Asn, Gln, Arg, Ser, Thr, Val, Trp or Tyr
  MOD_RES (12)...(12): Xaa = Ala, Asp, Glu, Lys, Leu, Asn, Pro, Gln, Arg, Ser, Thr or Val
  MOD_RES (13)...(13): Xaa = Ala, Cys, Asp, Glu, Phe, Gly, His, Ile, Lys, Leu, Met, Asn, Pro, Gln, Arg, Ser, Thr, Val or Tyr
  MOD_RES (14)...(14): Xaa = Ala, Asp, Glu, Phe, Gly, His, Ile, Lys, Leu, Met, Asn, Pro, Gln, Arg, Ser, Thr, Val, Trp or Tyr
  MOD_RES (15)...(15): Xaa = Ala, Asp, Glu, Phe, Gly, His, Ile, Lys, Leu, Asn, Pro, Gln, Arg, Ser, Thr, Val or Trp
  MOD_RES (16)...(16): Xaa = Ala, Asp, Glu, Gly, His, Lys, Leu, Met, Asn, Gln, Arg, Ser, Thr, Val, Trp or Tyr
  MOD_RES (17)...(17): Xaa = Ala, Phe, His, Ile, Leu, Pro, Arg, Thr, Val or Tyr
  MOD_RES (18)...(18): Xaa = Ala, Asp, Glu, Phe, His, Ile, Lys, Leu, Met, Asn, Gln, Arg, Ser, Thr, Val, Trp or Tyr
  MOD_RES (20)...(20): Xaa = Ala, Asp, Glu, Phe, Gly, His, Ile, Lys, Leu, Met, Asn, Pro, Gln, Arg, Ser, Thr, Val, Trp or Tyr
  MOD_RES (22)...(22): Xaa = Ala, Asp, Glu, Phe, Gly, His, Ile, Lys, Leu, Asn, Pro, Gln, Arg, Ser, Thr, Val or Tyr
  MOD_RES (23)...(23): Xaa = Ala, Asp, Glu, Phe, His, Ile, Lys, Leu, Met, Asn, Pro, Gln, Arg, Ser, Thr or Val
  MOD_RES (24)...(24): Xaa = Asp, Glu, Gly, Asn, Pro or Ser
  MOD_RES (25)...(25): Xaa = Ala, Asp, Glu, Phe, His, Leu, Met, Gln, Arg, Ser, Thr, Trp or Tyr
  MOD_RES (26)...(26): Xaa = Ala, Asp, Glu, Phe, Gly, His, Ile, Lys, Leu, Met, Asn, Gln, Arg, Ser, Thr, Val or Tyr
  MOD_RES (27)...(27): Xaa = Ala, Phe, Gly, Ile, Lys, Leu, Met, Pro, Gln, Arg, Ser, Thr, Val, Trp or Tyr
  MOD_RES (28)...(28): Xaa = Ala, Asp, Glu, Phe, Gly, His, Lys, Leu, Met, Asn, Pro, Gln, Arg, Ser, Thr, Val or Trp
  MOD_RES (29)...(29): Xaa = Ala, Asp, Glu, Gly, Ile, Lys, Leu, Met, Asn, Pro, Gln, Arg, Ser, Thr, Val or Tyr
  MOD_RES (30)...(30): Xaa = Ala, Asp, Glu, Phe, Gly, His, Ile, Lys, Leu, Met, Asn, Gln, Ser, Thr or Val
  MOD_RES (31)...(31): Xaa = Glu, Phe, Gly, His, Ile, Lys, Leu, Met, Asn, Pro, Gln, Arg, Ser, Thr or Trp
  MOD_RES (32)...(32): Xaa = Ala, Asp, Glu, Phe, Gly, His, Lys, Leu, Met, Asn, Pro, Gln, Arg, Ser, Thr, Val or Tyr
CXXXXCXXXCXXXXXXXXCXCXXXXXXXXXXXC

SEQ ID NO: 237 - protein, 34 aa, Artificial Sequence
  EGF domain monomer sequence
  MOD_RES (2)...(2): Xaa = Ala, Asp, Glu, Phe, Gly, His, Ile, Lys, Leu, Asn, Pro, Gln, Arg, Ser, Thr, Val or Trp
  MOD_RES (3)...(3): Xaa = Ala, Asp, Glu, Gly, His, Lys, Leu, Met, Asn, Pro, Arg, Ser, Thr or Tyr
  MOD_RES (4)...(4): Xaa = Ala, Asp, Glu, Gly, His, Lys, Leu, Met, Asn, Pro, Gln, Arg, Ser, Thr, Val or Trp
  MOD_RES (5)...(5): Xaa = Ala, Glu, Gly, Met, Asn, Pro, Gln, Arg, Ser, Thr or Tyr
  MOD_RES (7)...(7): Xaa = Ala, Asp, Glu, Gly, His, Lys, Asn, Pro, Gln, Ser, Thr or Val
  MOD_RES (8)...(8): Xaa = Phe, Gly, His, Leu, Asn, Gln, Ser, Thr or Tyr
  MOD_RES (9)...(9): Xaa = Ala, Asp, Glu, Phe, Gly, His, Ile, Lys, Leu, Asn, Gln, Arg, Ser, Thr, Val or Tyr
  MOD_RES (11)...(11): Xaa = Ala, Asp, Glu, Phe, Gly, His, Ile, Lys, Leu, Met, Asn, Gln, Arg, Ser, Thr, Val, Trp or Tyr
  MOD_RES (12)...(12): Xaa = Ala, Asp, Glu, Lys, Leu, Asn, Pro, Gln, Arg, Ser, Thr or Val
  MOD_RES (13)...(13): Xaa = Ala, Cys, Asp, Glu, Phe, Gly, His, Ile, Lys, Leu, Met, Asn, Pro, Gln, Arg, Ser, Thr, Val or Tyr
  MOD_RES (14)...(14): Xaa = Ala, Asp, Glu, Phe, Gly, His, Ile, Lys, Leu, Met, Asn, Pro, Gln, Arg, Ser, Thr, Val, Trp or Tyr
  MOD_RES (15)...(15): Xaa = Ala, Asp, Glu, Phe, Gly, His, Ile, Lys, Leu, Asn, Pro, Gln, Arg, Ser, Thr, Val or Trp
  MOD_RES (16)...(16): Xaa = Ala, Asp, Glu, Gly, His, Lys, Leu, Met, Asn, Gln, Arg, Ser, Thr, Val, Trp or Tyr
  MOD_RES (17)...(17): Xaa = Ala, Phe, His, Ile, Leu, Pro, Arg, Thr, Val or Tyr
  MOD_RES (18)...(18): Xaa = Ala, Asp, Glu, Phe, His, Ile, Lys, Leu, Met, Asn, Gln, Arg, Ser, Thr, Val, Trp or Tyr
  MOD_RES (20)...(20): Xaa = Ala, Asp, Glu, Phe, Gly, His, Ile, Lys, Leu, Met, Asn, Pro, Gln, Arg, Ser, Thr, Val, Trp or Tyr
  MOD_RES (22)...(22): Xaa = Ala, Asp, Glu, Phe, Gly, His, Ile, Lys, Leu, Asn, Pro, Gln, Arg, Ser, Thr, Val or Tyr
  MOD_RES (23)...(23): Xaa = Ala, Asp, Glu, Phe, His, Ile, Lys, Leu, Met, Asn, Pro, Gln, Arg, Ser, Thr or Val
  MOD_RES (24)...(24): Xaa = Asp, Glu, Gly, Asn, Pro or Ser
  MOD_RES (25)...(25): Xaa = Ala, Asp, Glu, Phe, His, Leu, Met, Gln, Arg, Ser, Thr, Trp or Tyr
  MOD_RES (26)...(26): Xaa = Ala, Asp, Glu, Phe, Gly, His, Ile, Lys, Leu, Met, Asn, Gln, Arg, Ser, Thr, Val or Tyr
  MOD_RES (27)...(27): Xaa = Ala, Phe, Gly, Ile, Lys, Leu, Met, Pro, Gln, Arg, Ser, Thr, Val, Trp or Tyr
  MOD_RES (28)...(28): Xaa = Ala, Asp, Glu, Phe, Gly, His, Lys, Leu, Met, Asn, Pro, Gln, Arg, Ser, Thr, Val or Trp
  MOD_RES (29)...(29): Xaa = Ala, Asp, Glu, Gly, Ile, Lys, Leu, Met, Asn, Pro, Gln, Arg, Ser, Thr, Val or Tyr
  MOD_RES (30)...(30): Xaa = Ala, Asp, Glu, Phe, Gly, His, Ile, Lys, Leu, Met, Asn, Gln, Ser, Thr or Val
  MOD_RES (31)...(31): Xaa = Glu, Phe, Gly, His, Ile, Lys, Leu, Met, Asn, Pro, Gln, Arg, Ser, Thr or Trp
  MOD_RES (32)...(32): Xaa = Ala, Asp, Glu, Phe, Gly, His, Lys, Leu, Met, Asn, Pro, Gln, Arg, Ser, Thr, Val or Tyr
  MOD_RES (33)...(33): Xaa = Ala, Asp, Glu, Phe, Gly, His, Ile, Lys, Met, Asn, Gln, Arg, Ser, Thr, Val or Tyr
CXXXXCXXXCXXXXXXXXCXCXXXXXXXXXXXXC

SEQ ID NO: 238 - protein, 31 aa, Artificial Sequence
  EGF domain monomer sequence
  MOD_RES (2)...(2): Xaa = Ala, Asp, Glu, Gly, Ile, Lys, Leu, Gln, Arg, Ser, Thr or Val
  MOD_RES (3)...(3): Xaa = Ala, Asp, Glu, Phe, Gly, His, Ile, Lys, Leu, Met, Asn, Pro, Gln, Arg, Ser, Thr or Val
  MOD_RES (4)...(4): Xaa = Ala, Glu, Phe, Gly, His, Leu, Asn, Pro, Gln, Arg, Ser, Thr, Trp or Tyr
  MOD_RES (5)...(5): Xaa = Ala, Asp, Glu, Phe, Gly, His, Ile, Lys, Leu, Asn, Pro, Arg, Ser or Thr
  MOD_RES (6)...(6): Xaa = Ala, Phe, Gly, Ile, Lys, Leu, Met, Asn, Pro, Gln, Arg, Ser, Thr, Val or Tyr
  MOD_RES (8)...(8): Xaa = Ala, Asp, Glu, Gly, His, Lys, Asn, Pro, Gln, Ser, Thr or Val
  MOD_RES (9)...(9): Xaa = Phe, Gly, His, Leu, Asn, Gln, Ser, Thr or Tyr
  MOD_RES (10)...(10): Xaa = Ala, Asp, Glu, Phe, Gly, His, Ile, Lys, Leu, Asn, Gln, Arg, Ser, Thr, Val or Tyr
  MOD_RES (12)...(12): Xaa = Ala, Asp, Glu, Phe, Gly, His, Ile, Lys, Leu, Met, Asn, Gln, Arg, Ser, Thr, Val, Trp or Tyr
  MOD_RES (13)...(13): Xaa = Ala, Asp, Glu, Lys, Leu, Asn, Pro, Gln, Arg, Ser, Thr or Val
  MOD_RES (14)...(14): Xaa = Ala, Cys, Asp, Glu, Phe, Gly, His, Ile, Lys, Leu, Met, Asn, Pro, Gln, Arg, Ser, Thr, Val or Tyr
  MOD_RES (15)...(15): Xaa = Ala, Asp, Glu, Phe, Gly, His, Ile, Lys, Leu, Met, Asn, Pro, Gln, Arg, Ser, Thr, Val, Trp or Tyr
  MOD_RES (16)...(16): Xaa = Ala, Asp, Glu, Phe, Gly, His, Ile, Lys, Leu, Asn, Pro, Gln, Arg, Ser, Thr, Val or Trp
  MOD_RES (17)...(17): Xaa = Ala, Asp, Glu, Gly, His, Lys, Leu, Met, Asn, Gln, Arg, Ser, Thr, Val, Trp or Tyr
  MOD_RES (18)...(18): Xaa = Ala, Phe, His, Ile, Leu, Pro, Arg, Thr, Val or Tyr
  MOD_RES (19)...(19): Xaa = Ala, Asp, Glu, Phe, His, Ile, Lys, Leu, Met, Asn, Gln, Arg, Ser, Thr, Val, Trp or Tyr
  MOD_RES (21)...(21): Xaa = Ala, Asp, Glu, Phe, Gly, His, Ile, Lys, Leu, Met, Asn, Pro, Gln, Arg, Ser, Thr, Val, Trp or Tyr
  MOD_RES (23)...(23): Xaa = Ala, Asp, Glu, Phe, His, Lys, Leu, Met, Asn, Pro, Gln, Arg, Ser, Thr, Val, Trp or Tyr
  MOD_RES (24)...(24): Xaa = Ala, Asp, Glu, Phe, Gly, His, Lys, Leu, Asn, Pro, Gln, Arg, Ser, Thr, Val or Tyr
  MOD_RES (25)...(25): Xaa = Ala, Glu, Gly, His, Lys, Leu, Asn, Pro, Arg, Ser, Thr or Tyr
  MOD_RES (26)...(26): Xaa = Phe, His, Ile, Leu, Met, Arg, Thr, Trp or Tyr
  MOD_RES (27)...(27): Xaa = Ala, Asp, Glu, Phe, Gly, His, Ile, Lys, Leu, Met, Asn, Gln, Arg, Ser, Thr, Val or Tyr
  MOD_RES (28)...(28): Xaa = Asp, Gly or Ser
  MOD_RES (29)...(29): Xaa = Ala, Asp, Glu, Phe, His, Ile, Lys, Leu, Asn, Pro, Gln, Arg, Ser, Thr, Val or Tyr
  MOD_RES (30)...(30): Xaa = Ala, Asp, Glu, Phe, His, Ile, Lys, Leu, Met, Asn, Gln, Arg, Ser, Thr or Tyr
CXXXXXCXXXCXXXXXXXXCXCXXXXXXXXC

SEQ ID NO: 239 - protein, 32 aa, Artificial Sequence
  EGF domain monomer sequence
  MOD_RES (2)...(2): Xaa = Ala, Asp, Glu, Gly, Ile, Lys, Leu, Gln, Arg, Ser, Thr or Val
  MOD_RES (3)...(3): Xaa = Ala, Asp, Glu, Phe, Gly, His, Ile, Lys, Leu, Met, Asn, Pro, Gln, Arg, Ser, Thr or Val
  MOD_RES (4)...(4): Xaa = Ala, Glu, Phe, Gly, His, Leu, Asn, Pro, Gln, Arg, Ser, Thr, Trp or Tyr
  MOD_RES (5)...(5): Xaa = Ala, Asp, Glu, Phe, Gly, His, Ile, Lys, Leu, Asn, Pro, Arg, Ser or Thr
  MOD_RES (6)...(6): Xaa = Ala, Phe, Gly, Ile, Lys, Leu, Met, Asn, Pro, Gln, Arg, Ser, Thr, Val or Tyr
  MOD_RES (8)...(8): Xaa = Ala, Asp, Glu, Gly, His, Lys, Asn, Pro, Gln, Ser, Thr or Val
  MOD_RES (9)...(9): Xaa = Phe, Gly, His, Leu, Asn, Gln, Ser, Thr or Tyr
  MOD_RES (10)...(10): Xaa = Ala, Asp, Glu, Phe, Gly, His, Ile, Lys, Leu, Asn, Gln, Arg, Ser, Thr, Val or Tyr
  MOD_RES (12)...(12): Xaa = Ala, Asp, Glu, Phe, Gly, His, Ile, Lys, Leu, Met, Asn, Gln, Arg, Ser, Thr, Val, Trp or Tyr
  MOD_RES (13)...(13): Xaa = Ala, Asp, Glu, Lys, Leu, Asn, Pro, Gln, Arg, Ser, Thr or Val
  MOD_RES (14)...(14): Xaa = Ala, Cys, Asp, Glu, Phe, Gly, His, Ile, Lys, Leu, Met, Asn, Pro, Gln, Arg, Ser, Thr, Val or Tyr
  MOD_RES (15)...(15): Xaa = Ala, Asp, Glu, Phe, Gly, His, Ile, Lys, Leu, Met, Asn, Pro, Gln, Arg, Ser, Thr, Val, Trp or Tyr
  MOD_RES (16)...(16): Xaa = Ala, Asp, Glu, Phe, Gly, His, Ile, Lys, Leu, Asn, Pro, Gln, Arg, Ser, Thr, Val or Trp
  MOD_RES (17)...(17): Xaa = Ala, Asp, Glu, Gly, His, Lys, Leu, Met, Asn, Gln, Arg, Ser, Thr, Val, Trp or Tyr
  MOD_RES (18)...(18): Xaa = Ala, Phe, His, Ile, Leu, Pro, Arg, Thr, Val or Tyr
  MOD_RES (19)...(19): Xaa = Ala, Asp, Glu, Phe, His, Ile, Lys, Leu, Met, Asn, Gln, Arg, Ser, Thr, Val, Trp or Tyr
  MOD_RES (21)...(21): Xaa = Ala, Asp, Glu, Phe, Gly, His, Ile, Lys, Leu, Met, Asn, Pro, Gln, Arg, Ser, Thr, Val, Trp or Tyr
  MOD_RES (23)...(23): Xaa = Ala, Asp, Glu, Phe, Gly, His, Ile, Lys, Leu, Asn, Pro, Gln, Arg, Ser, Thr, Val or Tyr
  MOD_RES (24)...(24): Xaa = Ala, Asp, Glu, Phe, His, Ile, Lys, Leu, Met, Asn, Pro, Gln, Arg, Ser, Thr or Val
  MOD_RES (25)...(25): Xaa = Asp, Glu, Gly, Asn, Pro or Ser
  MOD_RES (26)...(26): Xaa = Ala, Asp, Glu, Phe, His, Leu, Met, Gln, Arg, Ser, Thr, Trp or Tyr
  MOD_RES (27)...(27): Xaa = Ala, Asp, Glu, Phe, Gly, His, Ile, Lys, Leu, Met, Asn, Gln, Arg, Ser, Thr, Val or Tyr
  MOD_RES (28)...(28): Xaa = Ala, Phe, Gly, Ile, Lys, Leu, Met, Pro, Gln, Arg, Ser, Thr, Val, Trp or Tyr
  MOD_RES (29)...(29): Xaa = Ala, Asp, Glu, Phe, Gly, His, Lys, Leu, Met, Asn, Pro, Gln, Arg, Ser, Thr, Val or Trp
  MOD_RES (30)...(30): Xaa = Ala, Asp, Glu, Gly, Ile, Lys, Leu, Met, Asn, Pro, Gln, Arg, Ser, Thr, Val or Tyr
  MOD_RES (31)...(31): Xaa = Ala, Asp, Glu, Phe, Gly, His, Ile, Lys, Leu, Met, Asn, Gln, Ser, Thr or Val
CXXXXXCXXXCXXXXXXXXCXCXXXXXXXXXC

SEQ ID NO: 240 - protein, 33 aa, Artificial Sequence
  EGF domain monomer sequence
  MOD_RES (2)...(2): Xaa = Ala, Asp, Glu, Gly, Ile, Lys, Leu, Gln, Arg, Ser, Thr or Val
  MOD_RES (3)...(3): Xaa = Ala, Asp, Glu, Phe, Gly, His, Ile, Lys, Leu, Met, Asn, Pro, Gln, Arg, Ser, Thr or Val
  MOD_RES (4)...(4): Xaa = Ala, Glu, Phe, Gly, His, Leu, Asn, Pro, Gln, Arg, Ser, Thr, Trp or Tyr
  MOD_RES (5)...(5): Xaa = Ala, Asp, Glu, Phe, Gly, His, Ile, Lys, Leu, Asn, Pro, Arg, Ser or Thr
  MOD_RES (6)...(6): Xaa = Ala, Phe, Gly, Ile, Lys, Leu, Met, Asn, Pro, Gln, Arg, Ser, Thr, Val or Tyr
  MOD_RES (8)...(8): Xaa = Ala, Asp, Glu, Gly, His, Lys, Asn, Pro, Gln, Ser, Thr or Val
  MOD_RES (9)...(9): Xaa = Phe, Gly, His, Leu, Asn, Gln, Ser, Thr or Tyr
  MOD_RES (10)...(10): Xaa = Ala, Asp, Glu, Phe, Gly, His, Ile, Lys, Leu, Asn, Gln, Arg, Ser, Thr, Val or Tyr
  MOD_RES (12)...(12): Xaa = Ala, Asp, Glu, Phe, Gly, His, Ile, Lys, Leu, Met, Asn, Gln, Arg, Ser, Thr, Val, Trp or Tyr
  MOD_RES (13)...(13): Xaa = Ala, Asp, Glu, Lys, Leu, Asn, Pro, Gln, Arg, Ser, Thr or Val
  MOD_RES (14)...(14): Xaa = Ala, Cys, Asp, Glu, Phe, Gly, His, Ile, Lys, Leu, Met, Asn, Pro, Gln, Arg, Ser, Thr, Val or Tyr
  MOD_RES (15)...(15): Xaa = Ala, Asp, Glu, Phe, Gly, His, Ile, Lys, Leu, Met, Asn, Pro, Gln, Arg, Ser, Thr, Val, Trp or Tyr
  MOD_RES (16)...(16): Xaa = Ala, Asp, Glu, Phe, Gly, His, Ile, Lys, Leu, Asn, Pro, Gln, Arg, Ser, Thr, Val or Trp
  MOD_RES (17)...(17): Xaa = Ala, Asp, Glu, Gly, His, Lys, Leu, Met, Asn, Gln, Arg, Ser, Thr, Val, Trp or Tyr
  MOD_RES (18)...(18): Xaa = Ala, Phe, His, Ile, Leu, Pro, Arg, Thr, Val or Tyr
  MOD_RES (19)...(19): Xaa = Ala, Asp, Glu, Phe, His, Ile, Lys, Leu, Met, Asn, Gln, Arg, Ser, Thr, Val, Trp or Tyr
  MOD_RES (21)...(21): Xaa = Ala, Asp, Glu, Phe, Gly, His, Ile, Lys, Leu, Met, Asn, Pro, Gln, Arg, Ser, Thr, Val, Trp or Tyr
  MOD_RES (23)...(23): Xaa = Ala, Asp, Glu, Phe, Gly, His, Ile, Lys, Leu, Asn, Pro, Gln, Arg, Ser, Thr, Val or Tyr
  MOD_RES (24)...(24): Xaa = Ala, Asp, Glu, Phe, His, Ile, Lys, Leu, Met, Asn, Pro, Gln, Arg, Ser, Thr or Val
  MOD_RES (25)...(25): Xaa = Asp, Glu, Gly, Asn, Pro or Ser
  MOD_RES (26)...(26): Xaa = Ala, Asp, Glu, Phe, His, Leu, Met, Gln, Arg, Ser, Thr, Trp or Tyr
  MOD_RES (27)...(27): Xaa = Ala, Asp, Glu, Phe, Gly, His, Ile, Lys, Leu, Met, Asn, Gln, Arg, Ser, Thr, Val or Tyr
  MOD_RES (28)...(28): Xaa = Ala, Phe, Gly, Ile, Lys, Leu, Met, Pro, Gln, Arg, Ser, Thr, Val, Trp or Tyr
  MOD_RES (29)...(29): Xaa = Ala, Asp, Glu, Phe, Gly, His, Lys, Leu, Met, Asn, Pro, Gln, Arg, Ser, Thr, Val or Trp
  MOD_RES (30)...(30): Xaa = Ala, Asp, Glu, Gly, Ile, Lys, Leu, Met, Asn, Pro, Gln, Arg, Ser, Thr, Val or Tyr
  MOD_RES (31)...(31): Xaa = Ala, Asp, Glu, Phe, Gly, His, Ile, Lys, Leu, Met, Asn, Gln, Ser, Thr or Val
  MOD_RES (32)...(32): Xaa = Glu, Phe, Gly, His, Ile, Lys, Leu, Met, Asn, Pro, Gln, Arg, Ser, Thr or Trp
CXXXXXCXXXCXXXXXXXXCXCXXXXXXXXXXC

SEQ ID NO: 241 - protein, 34 aa, Artificial Sequence
  EGF domain monomer sequence
  MOD_RES (2)...(2): Xaa = Ala, Asp, Glu, Gly, Ile, Lys, Leu, Gln, Arg, Ser, Thr or Val
  MOD_RES (3)...(3): Xaa = Ala, Asp, Glu, Phe, Gly, His, Ile, Lys, Leu, Met, Asn, Pro, Gln, Arg, Ser, Thr or Val
  MOD_RES (4)...(4): Xaa = Ala, Glu, Phe, Gly, His, Leu, Asn, Pro, Gln, Arg, Ser, Thr, Trp or Tyr
  MOD_RES (5)...(5): Xaa = Ala, Asp, Glu, Phe, Gly, His, Ile, Lys, Leu, Asn, Pro, Arg, Ser or Thr
  MOD_RES (6)...(6): Xaa = Ala, Phe, Gly, Ile, Lys, Leu, Met, Asn, Pro, Gln, Arg, Ser, Thr, Val or Tyr
  MOD_RES (8)...(8): Xaa = Ala, Asp, Glu, Gly, His, Lys, Asn, Pro, Gln, Ser, Thr or Val
  MOD_RES (9)...(9): Xaa = Phe, Gly, His, Leu, Asn, Gln, Ser, Thr or Tyr
  MOD_RES (10)...(10): Xaa = Ala, Asp, Glu, Phe, Gly, His, Ile, Lys, Leu, Asn, Gln, Arg, Ser, Thr, Val or Tyr
  MOD_RES (12)...(12): Xaa = Ala, Asp, Glu, Phe, Gly, His, Ile, Lys, Leu, Met, Asn, Gln, Arg, Ser, Thr, Val, Trp or Tyr
  MOD_RES (13)...(13): Xaa = Ala, Asp, Glu, Lys, Leu, Asn, Pro, Gln, Arg, Ser, Thr or Val
  MOD_RES (14)...(14): Xaa = Ala, Cys, Asp, Glu, Phe, Gly, His, Ile, Lys, Leu, Met, Asn, Pro, Gln, Arg, Ser, Thr, Val or Tyr
  MOD_RES (15)...(15): Xaa = Ala, Asp, Glu, Phe, Gly, His, Ile, Lys, Leu, Met, Asn, Pro, Gln, Arg, Ser, Thr, Val, Trp or Tyr
  MOD_RES (16)...(16): Xaa = Ala, Asp, Glu, Phe, Gly, His, Ile, Lys, Leu, Asn, Pro, Gln, Arg, Ser, Thr, Val or Trp
  MOD_RES (17)...(17): Xaa = Ala, Asp, Glu, Gly, His, Lys, Leu, Met, Asn, Gln, Arg, Ser, Thr, Val, Trp or Tyr
  MOD_RES (18)...(18): Xaa = Ala, Phe, His, Ile, Leu, Pro, Arg, Thr, Val or Tyr
  MOD_RES (19)...(19): Xaa = Ala, Asp, Glu, Phe, His, Ile, Lys, Leu, Met, Asn, Gln, Arg, Ser, Thr, Val, Trp or Tyr
  MOD_RES (21)...(21): Xaa = Ala, Asp, Glu, Phe, Gly, His, Ile, Lys, Leu, Met, Asn, Pro, Gln, Arg, Ser, Thr, Val, Trp or Tyr
  MOD_RES (23)...(23): Xaa = Ala, Asp, Glu, Phe, Gly, His, Ile, Lys, Leu, Asn, Pro, Gln, Arg, Ser, Thr, Val or Tyr
  MOD_RES (24)...(24): Xaa = Ala, Asp, Glu, Phe, His, Ile, Lys, Leu, Met, Asn, Pro, Gln, Arg, Ser, Thr or Val
  MOD_RES (25)...(25): Xaa = Asp, Glu, Gly, Asn, Pro or Ser
  MOD_RES (26)...(26): Xaa = Ala, Asp, Glu, Phe, His, Leu, Met, Gln, Arg, Ser, Thr, Trp or Tyr
  MOD_RES (27)...(27): Xaa = Ala, Asp, Glu, Phe, Gly, His, Ile, Lys, Leu, Met, Asn, Gln, Arg, Ser, Thr, Val or Tyr
  MOD_RES (28)...(28): Xaa = Ala, Phe, Gly, Ile, Lys, Leu, Met, Pro, Gln, Arg, Ser, Thr, Val, Trp or Tyr
  MOD_RES (29)...(29): Xaa = Ala, Asp, Glu, Phe, Gly, His, Lys, Leu, Met, Asn, Pro, Gln, Arg, Ser, Thr, Val or Trp
  MOD_RES (30)...(30): Xaa = Ala, Asp, Glu, Gly, Ile, Lys, Leu, Met, Asn, Pro, Gln, Arg, Ser, Thr, Val or Tyr
  MOD_RES (31)...(31): Xaa = Ala, Asp, Glu, Phe, Gly, His, Ile, Lys, Leu, Met, Asn, Gln, Ser, Thr or Val
  MOD_RES (32)...(32): Xaa = Glu, Phe, Gly, His, Ile, Lys, Leu, Met, Asn, Pro, Gln, Arg, Ser, Thr or Trp
  MOD_RES (33)...(33): Xaa = Ala, Asp, Glu, Phe, Gly, His, Lys, Leu, Met, Asn, Pro, Gln, Arg, Ser, Thr, Val or Tyr
CXXXXXCXXXCXXXXXXXXCXCXXXXXXXXXXXC

SEQ ID NO: 242 - protein, 35 aa, Artificial Sequence
  EGF domain monomer sequence
  MOD_RES (2)...(2): Xaa = Ala, Asp, Glu, Gly, Ile, Lys, Leu, Gln, Arg, Ser, Thr or Val
  MOD_RES (3)...(3): Xaa = Ala, Asp, Glu, Phe, Gly, His, Ile, Lys, Leu, Met, Asn, Pro, Gln, Arg, Ser, Thr or Val
  MOD_RES (4)...(4): Xaa = Ala, Glu, Phe, Gly, His, Leu, Asn, Pro, Gln, Arg, Ser, Thr, Trp or Tyr
  MOD_RES (5)...(5): Xaa = Ala, Asp, Glu, Phe, Gly, His, Ile, Lys, Leu, Asn, Pro, Arg, Ser or Thr
  MOD_RES (6)...(6): Xaa = Ala, Phe, Gly, Ile, Lys, Leu, Met, Asn, Pro, Gln, Arg, Ser, Thr, Val or Tyr
  MOD_RES (8)...(8): Xaa = Ala, Asp, Glu, Gly, His, Lys, Asn, Pro, Gln, Ser, Thr or Val
  MOD_RES (9)...(9): Xaa = Phe, Gly, His, Leu, Asn, Gln, Ser, Thr or Tyr
  MOD_RES (10)...(10): Xaa = Ala, Asp, Glu, Phe, Gly, His, Ile, Lys, Leu, Asn, Gln, Arg, Ser, Thr, Val or Tyr
  MOD_RES (12)...(12): Xaa = Ala, Asp, Glu, Phe, Gly, His, Ile, Lys, Leu, Met, Asn, Gln, Arg, Ser, Thr, Val, Trp or Tyr
  MOD_RES (13)...(13): Xaa = Ala, Asp, Glu, Lys, Leu, Asn, Pro, Gln, Arg, Ser, Thr or Val
  MOD_RES (14)...(14): Xaa = Ala, Cys, Asp, Glu, Phe, Gly, His, Ile, Lys, Leu, Met, Asn, Pro, Gln, Arg, Ser, Thr, Val or Tyr
  MOD_RES (15)...(15): Xaa = Ala, Asp, Glu, Phe, Gly, His, Ile, Lys, Leu, Met, Asn, Pro, Gln, Arg, Ser, Thr, Val, Trp or Tyr
  MOD_RES (16)...(16): Xaa = Ala, Asp, Glu, Phe, Gly, His, Ile, Lys, Leu, Asn, Pro, Gln, Arg, Ser, Thr, Val or Trp
  MOD_RES (17)...(17): Xaa = Ala, Asp, Glu, Gly, His, Lys, Leu, Met, Asn, Gln, Arg, Ser, Thr, Val, Trp or Tyr
  MOD_RES (18)...(18): Xaa = Ala, Phe, His, Ile, Leu, Pro, Arg, Thr, Val or Tyr
  MOD_RES (19)...(19): Xaa = Ala, Asp, Glu, Phe, His, Ile, Lys, Leu, Met, Asn, Gln, Arg, Ser, Thr, Val, Trp or Tyr
  MOD_RES (21)...(21): Xaa = Ala, Asp, Glu, Phe, Gly, His, Ile, Lys, Leu, Met, Asn, Pro, Gln, Arg, Ser, Thr, Val, Trp or Tyr
  MOD_RES (23)...(23): Xaa = Ala, Asp, Glu, Phe, Gly, His, Ile, Lys, Leu, Asn, Pro, Gln, Arg, Ser, Thr, Val or Tyr
  MOD_RES (24)...(24): Xaa = Ala, Asp, Glu, Phe, His, Ile, Lys, Leu, Met, Asn, Pro, Gln, Arg, Ser, Thr or Val
  MOD_RES (25)...(25): Xaa = Asp, Glu, Gly, Asn, Pro or Ser
  MOD_RES (26)...(26): Xaa = Ala, Asp, Glu, Phe, His, Leu, Met, Gln, Arg, Ser, Thr, Trp or Tyr
  MOD_RES (27)...(27): Xaa = Ala, Asp, Glu, Phe, Gly, His, Ile, Lys, Leu, Met, Asn, Gln, Arg, Ser, Thr, Val or Tyr
  MOD_RES (28)...(28): Xaa = Ala, Phe, Gly, Ile, Lys, Leu, Met, Pro, Gln, Arg, Ser, Thr, Val, Trp or Tyr
  MOD_RES (29)...(29): Xaa = Ala, Asp, Glu, Phe, Gly, His, Lys, Leu, Met, Asn, Pro, Gln, Arg, Ser, Thr, Val or Trp
  MOD_RES (30)...(30): Xaa = Ala, Asp, Glu, Gly, Ile, Lys, Leu, Met, Asn, Pro, Gln, Arg, Ser, Thr, Val or Tyr
  MOD_RES (31)...(31): Xaa = Ala, Asp, Glu, Phe, Gly, His, Ile, Lys, Leu, Met, Asn, Gln, Ser, Thr or Val
  MOD_RES (32)...(32): Xaa = Glu, Phe, Gly, His, Ile, Lys, Leu, Met, Asn, Pro, Gln, Arg, Ser, Thr or Trp
  MOD_RES (33)...(33): Xaa = Ala, Asp, Glu, Phe, Gly, His, Lys, Leu, Met, Asn, Pro, Gln, Arg, Ser, Thr, Val or Tyr
  MOD_RES (34)...(34): Xaa = Ala, Asp, Glu, Phe, Gly, His, Ile, Lys, Met, Asn, Gln, Arg, Ser, Thr, Val or Tyr
CXXXXXCXXXCXXXXXXXXCXCXXXXXXXXXXXXC

SEQ ID NO: 243 - protein, 32 aa, Artificial Sequence
  EGF domain monomer sequence
  MOD_RES (2)...(2): Xaa = Ala, Asp, Glu, Phe, Gly, Ile, Lys, Leu, Met, Asn, Pro, Gln, Arg, Ser, Thr, Val or Tyr
  MOD_RES (3)...(3): Xaa = Ala, Asp, Glu, Phe, Gly, His, Ile, Lys, Leu, Met, Asn, Pro, Gln, Arg, Ser, Thr, Val or Tyr
  MOD_RES (4)...(4): Xaa = Ala, Asp, Glu, Phe, Gly, His, Ile, Lys, Leu, Met, Asn, Pro, Gln, Arg, Ser, Thr, Val or Trp
  MOD_RES (5)...(5): Xaa = Ala, Asp, Glu, Phe, Gly, His, Ile, Lys, Leu, Met, Asn, Pro, Gln, Arg, Ser, Thr or Val
  MOD_RES (6)...(6): Xaa = Ala, Asp, Glu, Phe, Gly, His, Ile, Lys, Leu, Asn, Pro, Gln, Arg, Ser, Val or Tyr
  MOD_RES (7)...(7): Xaa = Ala, Asp, Glu, Gly, Ile, Lys, Leu, Met, Asn, Pro, Gln, Arg, Ser, Thr, Val or Tyr
  MOD_RES (9)...(9): Xaa = Ala, Asp, Glu, Gly, His, Lys, Asn, Pro, Gln, Ser, Thr or Val
  MOD_RES (10)...(10): Xaa = Phe, Gly, His, Leu, Asn, Gln, Ser, Thr or Tyr
  MOD_RES (11)...(11): Xaa = Ala, Asp, Glu, Phe, Gly, His, Ile, Lys, Leu, Asn, Gln, Arg, Ser, Thr, Val or Tyr
  MOD_RES (13)...(13): Xaa = Ala, Asp, Glu, Phe, Gly, His, Ile, Lys, Leu, Met, Asn, Gln, Arg, Ser, Thr, Val, Trp or Tyr
  MOD_RES (14)...(14): Xaa = Ala, Asp, Glu, Lys, Leu, Asn, Pro, Gln, Arg, Ser, Thr or Val
  MOD_RES (15)...(15): Xaa = Ala, Cys, Asp, Glu, Phe, Gly, His, Ile, Lys, Leu, Met, Asn, Pro, Gln, Arg, Ser, Thr, Val or Tyr
  MOD_RES (16)...(16): Xaa = Ala, Asp, Glu, Phe, Gly, His, Ile, Lys, Leu, Met, Asn, Pro, Gln, Arg, Ser, Thr, Val, Trp or Tyr
  MOD_RES (17)...(17): Xaa = Ala, Asp, Glu, Phe, Gly, His, Ile, Lys, Leu, Asn, Pro, Gln, Arg, Ser, Thr, Val or Trp
  MOD_RES (18)...(18): Xaa = Ala, Asp, Glu, Gly, His, Lys, Leu, Met, Asn, Gln, Arg, Ser, Thr, Val, Trp or Tyr
  MOD_RES (19)...(19): Xaa = Ala, Phe, His, Ile, Leu, Pro, Arg, Thr, Val or Tyr
  MOD_RES (20)...(20): Xaa = Ala, Asp, Glu, Phe, His, Ile, Lys, Leu, Met, Asn, Gln, Arg, Ser, Thr, Val, Trp or Tyr
  MOD_RES (22)...(22): Xaa = Ala, Asp, Glu, Phe, Gly, His, Ile, Lys, Leu, Met, Asn, Pro, Gln, Arg, Ser, Thr, Val, Trp or Tyr
  MOD_RES (24)...(24): Xaa = Ala, Asp, Glu, Phe, His, Lys, Leu, Met, Asn, Pro, Gln, Arg, Ser, Thr, Val, Trp or Tyr
  MOD_RES (25)...(25): Xaa = Ala, Asp, Glu, Phe, Gly, His, Lys, Leu, Asn, Pro, Gln, Arg, Ser, Thr, Val or Tyr
  MOD_RES (26)...(26): Xaa = Ala, Glu, Gly, His, Lys, Leu, Asn, Pro, Arg, Ser, Thr or Tyr
  MOD_RES (27)...(27): Xaa = Phe, His, Ile, Leu, Met, Arg, Thr, Trp or Tyr
  MOD_RES (28)...(28): Xaa = Ala, Asp, Glu, Phe, Gly, His, Ile, Lys, Leu, Met, Asn, Gln, Arg, Ser, Thr, Val or Tyr
  MOD_RES (29)...(29): Xaa = Asp, Gly or Ser
  MOD_RES (30)...(30): Xaa = Ala, Asp, Glu, Phe, His, Ile, Lys, Leu, Asn, Pro, Gln, Arg, Ser, Thr, Val or Tyr
  MOD_RES (31)...(31): Xaa = Ala, Asp, Glu, Phe, His, Ile, Lys, Leu, Met, Asn, Gln, Arg, Ser, Thr or Tyr
CXXXXXXCXXXCXXXXXXXXCXCXXXXXXXXC

SEQ ID NO: 244 - protein, 33 aa, Artificial Sequence
  EGF domain monomer sequence
  MOD_RES (2)...(2): Xaa = Ala, Asp, Glu, Phe, Gly, Ile, Lys, Leu, Met, Asn, Pro, Gln, Arg, Ser, Thr, Val or Tyr
  MOD_RES (3)...(3): Xaa = Ala, Asp, Glu, Phe, Gly, His, Ile, Lys, Leu, Met, Asn, Pro, Gln, Arg, Ser, Thr, Val or Tyr
  MOD_RES (4)...(4): Xaa = Ala, Asp, Glu, Phe, Gly, His, Ile, Lys, Leu, Met, Asn, Pro, Gln, Arg, Ser, Thr, Val or Trp
  MOD_RES (5)...(5): Xaa = Ala, Asp, Glu, Phe, Gly, His, Ile, Lys, Leu, Met, Asn, Pro, Gln, Arg, Ser, Thr or Val
  MOD_RES (6)...(6): Xaa = Ala, Asp, Glu, Phe, Gly, His, Ile, Lys, Leu, Asn, Pro, Gln, Arg, Ser, Val or Tyr
  MOD_RES (7)...(7): Xaa = Ala, Asp, Glu, Gly, Ile, Lys, Leu, Met, Asn, Pro, Gln, Arg, Ser, Thr, Val or Tyr
  MOD_RES (9)...(9): Xaa = Ala, Asp, Glu, Gly, His, Lys, Asn, Pro, Gln, Ser, Thr or Val
  MOD_RES (10)...(10): Xaa = Phe, Gly, His, Leu, Asn, Gln, Ser, Thr or Tyr
  MOD_RES (11)...(11): Xaa = Ala, Asp, Glu, Phe, Gly, His, Ile, Lys, Leu, Asn, Gln, Arg, Ser, Thr, Val or Tyr
  MOD_RES (13)...(13): Xaa = Ala, Asp, Glu, Phe, Gly, His, Ile, Lys, Leu, Met, Asn, Gln, Arg, Ser, Thr, Val, Trp or Tyr
  MOD_RES (14)...(14): Xaa = Ala, Asp, Glu, Lys, Leu, Asn, Pro, Gln, Arg, Ser, Thr or Val
  MOD_RES (15)...(15): Xaa = Ala, Cys, Asp, Glu, Phe, Gly, His, Ile, Lys, Leu, Met, Asn, Pro, Gln, Arg, Ser, Thr, Val or Tyr
  MOD_RES (16)...(16): Xaa = Ala, Asp, Glu, Phe, Gly, His, Ile, Lys, Leu, Met, Asn, Pro, Gln, Arg, Ser, Thr, Val, Trp or Tyr
  MOD_RES (17)...(17): Xaa = Ala, Asp, Glu, Phe, Gly, His, Ile, Lys, Leu, Asn, Pro, Gln, Arg, Ser, Thr, Val or Trp
  MOD_RES (18)...(18): Xaa = Ala, Asp, Glu, Gly, His, Lys, Leu, Met, Asn, Gln, Arg, Ser, Thr, Val, Trp or Tyr
  MOD_RES (19)...(19): Xaa = Ala, Phe, His, Ile, Leu, Pro, Arg, Thr, Val or Tyr
  MOD_RES (20)...(20): Xaa = Ala, Asp, Glu, Phe, His, Ile, Lys, Leu, Met, Asn, Gln, Arg, Ser, Thr, Val, Trp or Tyr
  MOD_RES (22)...(22): Xaa = Ala, Asp, Glu, Phe, Gly, His, Ile, Lys, Leu, Met, Asn, Pro, Gln, Arg, Ser, Thr, Val, Trp or Tyr
  MOD_RES (24)...(24): Xaa = Ala, Asp, Glu, Phe, Gly, His, Ile, Lys, Leu, Asn, Pro, Gln, Arg, Ser, Thr, Val or Tyr
  MOD_RES (25)...(25): Xaa = Ala, Asp, Glu, Phe, His, Ile, Lys, Leu, Met, Asn, Pro, Gln, Arg, Ser, Thr or Val
  MOD_RES (26)...(26): Xaa = Asp, Glu, Gly, Asn, Pro or Ser
  MOD_RES (27)...(27): Xaa = Ala, Asp, Glu, Phe, His, Leu, Met, Gln, Arg, Ser, Thr, Trp or Tyr
  MOD_RES (28)...(28): Xaa = Ala, Asp, Glu, Phe, Gly, His, Ile, Lys, Leu, Met, Asn, Gln, Arg, Ser, Thr, Val or Tyr
  MOD_RES (29)...(29): Xaa = Ala, Phe, Gly, Ile, Lys, Leu, Met, Pro, Gln, Arg, Ser, Thr, Val, Trp or Tyr
  MOD_RES (30)...(30): Xaa = Ala, Asp, Glu, Phe, Gly, His, Lys, Leu, Met, Asn, Pro, Gln, Arg, Ser, Thr, Val or Trp
  MOD_RES (31)...(31): Xaa = Ala, Asp, Glu, Gly, Ile, Lys, Leu, Met, Asn, Pro, Gln, Arg, Ser, Thr, Val or Tyr
  MOD_RES (32)...(32): Xaa = Ala, Asp, Glu, Phe, Gly, His, Ile, Lys, Leu, Met, Asn, Gln, Ser, Thr or Val
CXXXXXXCXXXCXXXXXXXXCXCXXXXXXXXXC

SEQ ID NO: 245 - protein, 34 aa, Artificial Sequence
  EGF domain monomer sequence
  MOD_RES (2)...(2): Xaa = Ala, Asp, Glu, Phe, Gly, Ile, Lys, Leu, Met, Asn, Pro, Gln, Arg, Ser, Thr, Val or Tyr
  MOD_RES (3)...(3): Xaa = Ala, Asp, Glu, Phe, Gly, His, Ile, Lys, Leu, Met, Asn, Pro, Gln, Arg, Ser, Thr, Val or Tyr
  MOD_RES (4)...(4): Xaa = Ala, Asp, Glu, Phe, Gly, His, Ile, Lys, Leu, Met, Asn, Pro, Gln, Arg, Ser, Thr, Val or Trp
  MOD_RES (5)...(5): Xaa = Ala, Asp, Glu, Phe, Gly, His, Ile, Lys, Leu, Met, Asn, Pro, Gln, Arg, Ser, Thr or Val
  MOD_RES (6)...(6): Xaa = Ala, Asp, Glu, Phe, Gly, His, Ile, Lys, Leu, Asn, Pro, Gln, Arg, Ser, Val or Tyr
  MOD_RES (7)...(7): Xaa = Ala, Asp, Glu, Gly, Ile, Lys, Leu, Met, Asn, Pro, Gln, Arg, Ser, Thr, Val or Tyr
  MOD_RES (9)...(9): Xaa = Ala, Asp, Glu, Gly, His, Lys, Asn, Pro, Gln, Ser, Thr or Val
  MOD_RES (10)...(10): Xaa = Phe, Gly, His, Leu, Asn, Gln, Ser, Thr or Tyr
  MOD_RES (11)...(11): Xaa = Ala, Asp, Glu, Phe, Gly, His, Ile, Lys, Leu, Asn, Gln, Arg, Ser, Thr, Val or Tyr
  MOD_RES (13)...(13): Xaa = Ala, Asp, Glu, Phe, Gly, His, Ile, Lys, Leu, Met, Asn, Gln, Arg, Ser, Thr, Val, Trp or Tyr
  MOD_RES (14)...(14): Xaa = Ala, Asp, Glu, Lys, Leu, Asn, Pro, Gln, Arg, Ser, Thr or Val
  MOD_RES (15)...(15): Xaa = Ala, Cys, Asp, Glu, Phe, Gly, His, Ile, Lys, Leu, Met, Asn, Pro, Gln, Arg, Ser, Thr, Val or Tyr
  MOD_RES (16)...(16): Xaa = Ala, Asp, Glu, Phe, Gly, His, Ile, Lys, Leu, Met, Asn, Pro, Gln, Arg, Ser, Thr, Val, Trp or Tyr
  MOD_RES (17)...(17): Xaa = Ala, Asp, Glu, Phe, Gly, His, Ile, Lys, Leu, Asn, Pro, Gln, Arg, Ser, Thr, Val or Trp
  MOD_RES (18)...(18): Xaa = Ala, Asp, Glu, Gly, His, Lys, Leu, Met, Asn, Gln, Arg, Ser, Thr, Val, Trp or Tyr
  MOD_RES (19)...(19): Xaa = Ala, Phe, His, Ile, Leu, Pro, Arg, Thr, Val or Tyr
  MOD_RES (20)...(20): Xaa = Ala, Asp, Glu, Phe, His, Ile, Lys, Leu, Met, Asn, Gln, Arg, Ser, Thr, Val, Trp or Tyr
  MOD_RES (22)...(22): Xaa = Ala, Asp, Glu, Phe, Gly, His, Ile, Lys, Leu, Met, Asn, Pro, Gln, Arg, Ser, Thr, Val, Trp or Tyr
  MOD_RES (24)...(24): Xaa = Ala, Asp, Glu, Phe, Gly, His, Ile, Lys, Leu, Asn, Pro, Gln, Arg, Ser, Thr, Val or Tyr
  MOD_RES (25)...(25): Xaa = Ala, Asp, Glu, Phe, His, Ile, Lys, Leu, Met, Asn, Pro, Gln, Arg, Ser, Thr or Val
  MOD_RES (26)...(26): Xaa = Asp, Glu, Gly, Asn, Pro or Ser
  MOD_RES (27)...(27): Xaa = Ala, Asp, Glu, Phe, His, Leu, Met, Gln, Arg, Ser, Thr, Trp or Tyr
  MOD_RES (28)...(28): Xaa = Ala, Asp, Glu, Phe, Gly, His, Ile, Lys, Leu, Met, Asn, Gln, Arg, Ser, Thr, Val or Tyr
  MOD_RES (29)...(29): Xaa = Ala, Phe, Gly, Ile, Lys, Leu, Met, Pro, Gln, Arg, Ser, Thr, Val, Trp or Tyr
  MOD_RES (30)...(30): Xaa = Ala, Asp, Glu, Phe, Gly, His, Lys, Leu, Met, Asn, Pro, Gln, Arg, Ser, Thr, Val or Trp
  MOD_RES (31)...(31): Xaa = Ala, Asp, Glu, Gly, Ile, Lys, Leu, Met, Asn, Pro, Gln, Arg, Ser, Thr, Val or Tyr
  MOD_RES (32)...(32): Xaa = Ala, Asp, Glu, Phe, Gly, His, Ile, Lys, Leu, Met, Asn, Gln, Ser, Thr or Val
  MOD_RES (33)...(33): Xaa = Glu, Phe, Gly, His, Ile, Lys, Leu, Met, Asn, Pro, Gln, Arg, Ser, Thr or Trp
CXXXXXXCXXXCXXXXXXXXCXCXXXXXXXXXXC

SEQ ID NO: 246 - protein, 35 aa, Artificial Sequence
  EGF domain monomer sequence
  MOD_RES (2)...(2): Xaa = Ala, Asp, Glu, Phe, Gly, Ile, Lys, Leu, Met, Asn, Pro, Gln, Arg, Ser, Thr, Val or Tyr
  MOD_RES (3)...(3): Xaa = Ala, Asp, Glu, Phe, Gly, His, Ile, Lys, Leu, Met, Asn, Pro, Gln, Arg, Ser, Thr, Val or Tyr
  MOD_RES (4)...(4): Xaa = Ala, Asp, Glu, Phe, Gly, His, Ile, Lys, Leu, Met, Asn, Pro, Gln, Arg, Ser, Thr, Val or Trp
  MOD_RES (5)...(5): Xaa = Ala, Asp, Glu, Phe, Gly, His, Ile, Lys, Leu, Met, Asn, Pro, Gln, Arg, Ser, Thr or Val
  MOD_RES (6)...(6): Xaa = Ala, Asp, Glu, Phe, Gly, His, Ile, Lys, Leu, Asn, Pro, Gln, Arg, Ser, Val or Tyr
  MOD_RES (7)...(7): Xaa = Ala, Asp, Glu, Gly, Ile, Lys, Leu, Met, Asn, Pro, Gln, Arg, Ser, Thr, Val or Tyr
  MOD_RES (9)...(9): Xaa = Ala, Asp, Glu, Gly, His, Lys, Asn, Pro, Gln, Ser, Thr or Val
  MOD_RES (10)...(10): Xaa = Phe, Gly, His, Leu, Asn, Gln, Ser, Thr or Tyr
  MOD_RES (11)...(11): Xaa = Ala, Asp, Glu, Phe, Gly, His, Ile, Lys, Leu, Asn, Gln, Arg, Ser, Thr, Val or Tyr
  MOD_RES (13)...(13): Xaa = Ala, Asp, Glu, Phe, Gly, His, Ile, Lys, Leu, Met, Asn, Gln, Arg, Ser, Thr, Val, Trp or Tyr
  MOD_RES (14)...(14): Xaa = Ala, Asp, Glu, Lys, Leu, Asn, Pro, Gln, Arg, Ser, Thr or Val
  MOD_RES (15)...(15): Xaa = Ala, Cys, Asp, Glu, Phe, Gly, His, Ile, Lys, Leu, Met, Asn, Pro, Gln, Arg, Ser, Thr, Val or Tyr
  MOD_RES (16)...(16): Xaa = Ala, Asp, Glu, Phe, Gly, His, Ile, Lys, Leu, Met, Asn, Pro, Gln, Arg, Ser, Thr, Val, Trp or Tyr
  MOD_RES (17)...(17): Xaa = Ala, Asp, Glu, Phe, Gly, His, Ile, Lys, Leu, Asn, Pro, Gln, Arg, Ser, Thr, Val or Trp
  MOD_RES (18)...(18): Xaa = Ala, Asp, Glu, Gly, His, Lys, Leu, Met, Asn, Gln, Arg, Ser, Thr, Val, Trp or Tyr
  MOD_RES (19)...(19): Xaa = Ala, Phe, His, Ile, Leu, Pro, Arg, Thr, Val or Tyr
  MOD_RES (20)...(20): Xaa = Ala, Asp, Glu, Phe, His, Ile, Lys, Leu, Met, Asn, Gln, Arg, Ser, Thr, Val, Trp or Tyr
  MOD_RES (22)...(22): Xaa = Ala, Asp, Glu, Phe, Gly, His, Ile, Lys, Leu, Met, Asn, Pro, Gln, Arg, Ser, Thr, Val, Trp or Tyr
  MOD_RES (24)...(24): Xaa = Ala, Asp, Glu, Phe, Gly, His, Ile, Lys, Leu, Asn, Pro, Gln, Arg, Ser, Thr, Val or Tyr
  MOD_RES (25)...(25): Xaa = Ala, Asp, Glu, Phe, His, Ile, Lys, Leu, Met, Asn, Pro, Gln, Arg, Ser, Thr or Val
  MOD_RES (26)...(26): Xaa = Asp, Glu, Gly, Asn, Pro or Ser
  MOD_RES (27)...(27): Xaa = Ala, Asp, Glu, Phe, His, Leu, Met, Gln, Arg, Ser, Thr, Trp or Tyr
  MOD_RES (28)...(28): Xaa = Ala, Asp, Glu, Phe, Gly, His, Ile, Lys, Leu, Met, Asn, Gln, Arg, Ser, Thr, Val or Tyr
  MOD_RES (29)...(29): Xaa = Ala, Phe, Gly, Ile, Lys, Leu, Met, Pro, Gln, Arg, Ser, Thr, Val, Trp or Tyr
  MOD_RES (30)...(30): Xaa = Ala, Asp, Glu, Phe, Gly, His, Lys, Leu, Met, Asn, Pro, Gln, Arg, Ser, Thr, Val or Trp
  MOD_RES (31)...(31): Xaa = Ala, Asp, Glu, Gly, Ile, Lys, Leu, Met, Asn, Pro, Gln, Arg, Ser, Thr, Val or Tyr
  MOD_RES (32)...(32): Xaa = Ala, Asp, Glu, Phe, Gly, His, Ile, Lys, Leu, Met, Asn, Gln, Ser, Thr or Val
  MOD_RES (33)...(33): Xaa = Glu, Phe, Gly, His, Ile, Lys, Leu, Met, Asn, Pro, Gln, Arg, Ser, Thr or Trp
  MOD_RES (34)...(34): Xaa = Ala, Asp, Glu, Phe, Gly, His, Lys, Leu, Met, Asn, Pro, Gln, Arg, Ser, Thr, Val or Tyr
CXXXXXXCXXXCXXXXXXXXCXCXXXXXXXXXXXC

SEQ ID NO: 247 - protein, 36 aa, Artificial Sequence
  EGF domain monomer sequence
  MOD_RES (2)...(2): Xaa = Ala, Asp, Glu, Phe, Gly, Ile, Lys, Leu, Met, Asn, Pro, Gln, Arg, Ser, Thr, Val or Tyr
  MOD_RES (3)...(3): Xaa = Ala, Asp, Glu, Phe, Gly, His, Ile, Lys, Leu, Met, Asn, Pro, Gln, Arg, Ser, Thr, Val or Tyr
  MOD_RES (4)...(4): Xaa = Ala, Asp, Glu, Phe, Gly, His, Ile, Lys, Leu, Met, Asn, Pro, Gln, Arg, Ser, Thr, Val or Trp
  MOD_RES (5)...(5): Xaa = Ala, Asp, Glu, Phe, Gly, His, Ile, Lys, Leu, Met, Asn, Pro, Gln, Arg, Ser, Thr or Val
  MOD_RES (6)...(6): Xaa = Ala, Asp, Glu, Phe, Gly, His, Ile, Lys, Leu, Asn, Pro, Gln, Arg, Ser, Val or Tyr
  MOD_RES (7)...(7): Xaa = Ala, Asp, Glu, Gly, Ile, Lys, Leu, Met, Asn, Pro, Gln, Arg, Ser, Thr, Val or Tyr
  MOD_RES (9)...(9): Xaa = Ala, Asp, Glu, Gly, His, Lys, Asn, Pro, Gln, Ser, Thr or Val
  MOD_RES (10)...(10): Xaa = Phe, Gly, His, Leu, Asn, Gln, Ser, Thr or Tyr
  MOD_RES (11)...(11): Xaa = Ala, Asp, Glu, Phe, Gly, His, Ile, Lys, Leu, Asn, Gln, Arg, Ser, Thr, Val or Tyr
  MOD_RES (13)...(13): Xaa = Ala, Asp, Glu, Phe, Gly, His, Ile, Lys, Leu, Met, Asn, Gln, Arg, Ser, Thr, Val, Trp or Tyr
  MOD_RES (14)...(14): Xaa = Ala, Asp, Glu, Lys, Leu, Asn, Pro, Gln, Arg, Ser, Thr or Val
  MOD_RES (15)...(15): Xaa = Ala, Cys, Asp, Glu, Phe, Gly, His, Ile, Lys, Leu, Met, Asn, Pro, Gln, Arg, Ser, Thr, Val or Tyr
  MOD_RES (16)...(16): Xaa = Ala, Asp, Glu, Phe, Gly, His, Ile, Lys, Leu, Met, Asn, Pro, Gln, Arg, Ser, Thr, Val, Trp or Tyr
  MOD_RES (17)...(17): Xaa = Ala, Asp, Glu, Phe, Gly, His, Ile, Lys, Leu, Asn, Pro, Gln, Arg, Ser, Thr, Val or Trp
  MOD_RES (18)...(18): Xaa = Ala, Asp, Glu, Gly, His, Lys, Leu, Met, Asn, Gln, Arg, Ser, Thr, Val, Trp or Tyr
  MOD_RES (19)...(19): Xaa = Ala, Phe, His, Ile, Leu, Pro, Arg, Thr, Val or Tyr
  MOD_RES (20)...(20): Xaa = Ala, Asp, Glu, Phe, His, Ile, Lys, Leu, Met, Asn, Gln, Arg, Ser, Thr, Val, Trp or Tyr
  MOD_RES (22)...(22): Xaa = Ala, Asp, Glu, Phe, Gly, His, Ile, Lys, Leu, Met, Asn, Pro, Gln, Arg, Ser, Thr, Val, Trp or Tyr
  MOD_RES (24)...(24): Xaa = Ala, Asp, Glu, Phe, Gly, His, Ile, Lys, Leu, Asn, Pro, Gln, Arg, Ser, Thr, Val or Tyr
  MOD_RES (25)...(25): Xaa = Ala, Asp, Glu, Phe, His, Ile, Lys, Leu, Met, Asn, Pro, Gln, Arg, Ser, Thr or Val
  MOD_RES (26)...(26): Xaa = Asp, Glu, Gly, Asn, Pro or Ser
  MOD_RES (27)...(27): Xaa = Ala, Asp, Glu, Phe, His, Leu, Met, Gln, Arg, Ser, Thr, Trp or Tyr
  MOD_RES (28)...(28): Xaa = Ala, Asp, Glu, Phe, Gly, His, Ile, Lys, Leu, Met, Asn, Gln, Arg, Ser, Thr, Val or Tyr
  MOD_RES (29)...(29): Xaa = Ala, Phe, Gly, Ile, Lys, Leu, Met, Pro, Gln, Arg, Ser, Thr, Val, Trp or Tyr
  MOD_RES (30)...(30): Xaa = Ala, Asp, Glu, Phe, Gly, His, Lys, Leu, Met, Asn, Pro, Gln, Arg, Ser, Thr, Val or Trp
  MOD_RES (31)...(31): Xaa = Ala, Asp, Glu, Gly, Ile, Lys, Leu, Met, Asn, Pro, Gln, Arg, Ser, Thr, Val or Tyr
  MOD_RES (32)...(32): Xaa = Ala, Asp, Glu, Phe, Gly, His, Ile, Lys, Leu, Met, Asn, Gln, Ser, Thr or Val
  MOD_RES (33)...(33): Xaa = Glu, Phe, Gly, His, Ile, Lys, Leu, Met, Asn, Pro, Gln, Arg, Ser, Thr or Trp
  MOD_RES (34)...(34): Xaa = Ala, Asp, Glu, Phe, Gly, His, Lys, Leu, Met, Asn, Pro, Gln, Arg, Ser, Thr, Val or Tyr
  MOD_RES (35)...(35): Xaa = Ala, Asp, Glu, Phe, Gly, His, Ile, Lys, Met, Asn, Gln, Arg, Ser, Thr, Val or Tyr
CXXXXXXCXXXCXXXXXXXXCXCXXXXXXXXXXXXC

SEQ ID NO: 248 - protein, 31 aa, Artificial Sequence
  EGF domain monomer sequence
  MOD_RES (2)...(2): Xaa = Ala, Asp, Glu, Phe, Gly, His, Ile, Lys, Leu, Asn, Pro, Gln, Arg, Ser, Thr, Val or Trp
  MOD_RES (3)...(3): Xaa = Ala, Asp, Glu, Gly, His, Lys, Leu, Met, Asn, Pro, Arg, Ser, Thr or Tyr
  MOD_RES (4)...(4): Xaa = Ala, Asp, Glu, Gly, His, Lys, Leu, Met, Asn, Pro, Gln, Arg, Ser, Thr, Val or Trp
  MOD_RES (5)...(5): Xaa = Ala, Glu, Gly, Met, Asn, Pro, Gln, Arg, Ser, Thr or Tyr
  MOD_RES (7)...(7): Xaa = Ala, Asp, Glu, Phe, Gly, His, Ile, Lys, Leu, Met, Asn, Pro, Gln, Arg, Ser, Thr or Val
  MOD_RES (8)...(8): Xaa = Ala, Asp, Glu, Phe, Gly, His, Lys, Leu, Asn, Pro, Gln, Arg, Ser, Thr or Tyr
  MOD_RES (9)...(9): Xaa = Ala, Gly or Thr
  MOD_RES (10)...(10): Xaa = Ala, Asp, Glu, Phe, His, Ile, Lys, Leu, Met, Asn, Gln, Arg, Ser, Thr or Val
  MOD_RES (12)...(12): Xaa = Ala, Asp, Glu, Phe, Gly, His, Ile, Lys, Leu, Met, Asn, Gln, Arg, Ser, Thr, Val, Trp or Tyr
  MOD_RES (13)...(13): Xaa = Ala, Asp, Glu, Lys, Leu, Asn, Pro, Gln, Arg, Ser, Thr or Val
  MOD_RES (14)...(14): Xaa = Ala, Cys, Asp, Glu, Phe, Gly, His, Ile, Lys, Leu, Met, Asn, Pro, Gln, Arg, Ser, Thr, Val or Tyr
  MOD_RES (15)...(15): Xaa = Ala, Asp, Glu, Phe, Gly, His, Ile, Lys, Leu, Met, Asn, Pro, Gln, Arg, Ser, Thr, Val, Trp or Tyr
  MOD_RES (16)...(16): Xaa = Ala, Asp, Glu, Phe, Gly, His, Ile, Lys, Leu, Asn, Pro, Gln, Arg, Ser, Thr, Val or Trp
  MOD_RES (17)...(17): Xaa = Ala, Asp, Glu, Gly, His, Lys, Leu, Met, Asn, Gln, Arg, Ser, Thr, Val, Trp or Tyr
  MOD_RES (18)...(18): Xaa = Ala, Phe, His, Ile, Leu, Pro, Arg, Thr, Val or Tyr
  MOD_RES (19)...(19): Xaa = Ala, Asp, Glu, Phe, His, Ile, Lys, Leu, Met, Asn, Gln, Arg, Ser, Thr, Val, Trp or Tyr
  MOD_RES (21)...(21): Xaa = Ala, Asp, Glu, Phe, Gly, His, Ile, Lys, Leu, Met, Asn, Pro, Gln, Arg, Ser, Thr, Val, Trp or Tyr
  MOD_RES (23)...(23): Xaa = Ala, Asp, Glu, Phe, His, Lys, Leu, Met, Asn, Pro, Gln, Arg, Ser, Thr, Val, Trp or Tyr
  MOD_RES (24)...(24): Xaa = Ala, Asp, Glu, Phe, Gly, His, Lys, Leu, Asn, Pro, Gln, Arg, Ser, Thr, Val or Tyr
  MOD_RES (25)...(25): Xaa = Ala, Glu, Gly, His, Lys, Leu, Asn, Pro, Arg, Ser, Thr or Tyr
  MOD_RES (26)...(26): Xaa = Phe, His, Ile, Leu, Met, Arg, Thr, Trp or Tyr
  MOD_RES (27)...(27): Xaa = Ala, Asp, Glu, Phe, Gly, His, Ile, Lys, Leu, Met, Asn, Gln, Arg, Ser, Thr, Val or Tyr
  MOD_RES (28)...(28): Xaa = Asp, Gly or Ser
  MOD_RES (29)...(29): Xaa = Ala, Asp, Glu, Phe, His, Ile, Lys, Leu, Asn, Pro, Gln, Arg, Ser, Thr, Val or Tyr
  MOD_RES (30)...(30): Xaa = Ala, Asp, Glu, Phe, His, Ile, Lys, Leu, Met, Asn, Gln, Arg, Ser, Thr or Tyr
CXXXXCXXXXCXXXXXXXXCXCXXXXXXXXC

SEQ ID NO: 249 - protein, 32 aa, Artificial Sequence
  EGF domain monomer sequence
  MOD_RES (2)...(2): Xaa = Ala, Asp, Glu, Phe, Gly, His, Ile, Lys, Leu, Asn, Pro, Gln, Arg, Ser, Thr, Val or Trp
  MOD_RES (3)...(3): Xaa = Ala, Asp, Glu, Gly, His, Lys, Leu, Met, Asn, Pro, Arg, Ser, Thr or Tyr
  MOD_RES (4)...(4): Xaa = Ala, Asp, Glu, Gly, His, Lys, Leu, Met, Asn, Pro, Gln, Arg, Ser, Thr, Val or Trp
  MOD_RES (5)...(5): Xaa = Ala, Glu, Gly, Met, Asn, Pro, Gln, Arg, Ser, Thr or Tyr
  MOD_RES (7)...(7): Xaa = Ala, Asp, Glu, Phe, Gly, His, Ile, Lys, Leu, Met, Asn, Pro, Gln, Arg, Ser, Thr or Val
  MOD_RES (8)...(8): Xaa = Ala, Asp, Glu, Phe, Gly, His, Lys, Leu, Asn, Pro, Gln, Arg, Ser, Thr or Tyr
  MOD_RES (9)...(9): Xaa = Ala, Gly or Thr
  MOD_RES (10)...(10): Xaa = Ala, Asp, Glu, Phe, His, Ile, Lys, Leu, Met, Asn, Gln, Arg, Ser, Thr or Val
  MOD_RES (12)...(12): Xaa = Ala, Asp, Glu, Phe, Gly, His, Ile, Lys, Leu, Met, Asn, Gln, Arg, Ser, Thr, Val, Trp or Tyr
  MOD_RES (13)...(13): Xaa = Ala, Asp, Glu, Lys, Leu, Asn, Pro, Gln, Arg, Ser, Thr or Val
  MOD_RES (14)...(14): Xaa = Ala, Cys, Asp, Glu, Phe, Gly, His, Ile, Lys, Leu, Met, Asn, Pro, Gln, Arg, Ser, Thr, Val or Tyr
  MOD_RES (15)...(15): Xaa = Ala, Asp, Glu, Phe, Gly, His, Ile, Lys, Leu, Met, Asn, Pro, Gln, Arg, Ser, Thr, Val, Trp or Tyr
  MOD_RES (16)...(16): Xaa = Ala, Asp, Glu, Phe, Gly, His, Ile, Lys, Leu, Asn, Pro, Gln, Arg, Ser, Thr, Val or Trp
  MOD_RES (17)...(17): Xaa = Ala, Asp, Glu, Gly, His, Lys, Leu, Met, Asn, Gln, Arg, Ser, Thr, Val, Trp or Tyr
  MOD_RES (18)...(18): Xaa = Ala, Phe, His, Ile, Leu, Pro, Arg, Thr, Val or Tyr
  MOD_RES (19)...(19): Xaa = Ala, Asp, Glu, Phe, His, Ile, Lys, Leu, Met, Asn, Gln, Arg, Ser, Thr, Val, Trp or Tyr
  MOD_RES (21)...(21): Xaa = Ala, Asp, Glu, Phe, Gly, His, Ile, Lys, Leu, Met, Asn, Pro, Gln, Arg, Ser, Thr, Val, Trp or Tyr
  MOD_RES (23)...(23): Xaa = Ala, Asp, Glu, Phe, Gly, His, Ile, Lys, Leu, Asn, Pro, Gln, Arg, Ser, Thr, Val or Tyr
  MOD_RES (24)...(24): Xaa = Ala, Asp, Glu, Phe, His, Ile, Lys, Leu, Met, Asn, Pro, Gln, Arg, Ser, Thr or Val
  MOD_RES (25)...(25): Xaa = Asp, Glu, Gly, Asn, Pro or Ser
  MOD_RES (26)...(26): Xaa = Ala, Asp, Glu, Phe, His, Leu, Met, Gln, Arg, Ser, Thr, Trp or Tyr
  MOD_RES (27)...(27): Xaa = Ala, Asp, Glu, Phe, Gly, His, Ile, Lys, Leu, Met, Asn, Gln, Arg, Ser, Thr, Val or Tyr
  MOD_RES (28)...(28): Xaa = Ala, Phe, Gly, Ile, Lys, Leu, Met, Pro, Gln, Arg, Ser, Thr, Val, Trp or Tyr
  MOD_RES (29)...(29): Xaa = Ala, Asp, Glu, Phe, Gly, His, Lys, Leu, Met, Asn, Pro, Gln, Arg, Ser, Thr, Val or Trp
  MOD_RES (30)...(30): Xaa = Ala, Asp, Glu, Gly, Ile, Lys, Leu, Met, Asn, Pro, Gln, Arg, Ser, Thr, Val or Tyr
  MOD_RES (31)...(31): Xaa = Ala, Asp, Glu, Phe, Gly, His, Ile, Lys, Leu, Met, Asn, Gln, Ser, Thr or Val
CXXXXCXXXXCXXXXXXXXCXCXXXXXXXXXC

SEQ ID NO: 250 - protein, 33 aa, Artificial Sequence
  EGF domain monomer sequence
  MOD_RES (2)...(2): Xaa = Ala, Asp, Glu, Phe, Gly, His, Ile, Lys, Leu, Asn, Pro, Gln, Arg, Ser, Thr, Val or Trp
  MOD_RES (3)...(3): Xaa = Ala, Asp, Glu, Gly, His, Lys, Leu, Met, Asn, Pro, Arg, Ser, Thr or Tyr
  MOD_RES (4)...(4): Xaa = Ala, Asp, Glu, Gly, His, Lys, Leu, Met, Asn, Pro, Gln, Arg, Ser, Thr, Val or Trp
  MOD_RES (5)...(5): Xaa = Ala, Glu, Gly, Met, Asn, Pro, Gln, Arg, Ser, Thr or Tyr
  MOD_RES (7)...(7): Xaa = Ala, Asp, Glu, Phe, Gly, His, Ile, Lys, Leu, Met, Asn, Pro, Gln, Arg, Ser, Thr or Val
  MOD_RES (8)...(8): Xaa = Ala, Asp, Glu, Phe, Gly, His, Lys, Leu, Asn, Pro, Gln, Arg, Ser, Thr or Tyr
  MOD_RES (9)...(9): Xaa = Ala, Gly or Thr
  MOD_RES (10)...(10): Xaa = Ala, Asp, Glu, Phe, His, Ile, Lys, Leu, Met, Asn, Gln, Arg, Ser, Thr or Val
  MOD_RES (12)...(12): Xaa = Ala, Asp, Glu, Phe, Gly, His, Ile, Lys, Leu, Met, Asn, Gln, Arg, Ser, Thr, Val, Trp or Tyr
  MOD_RES (13)...(13): Xaa = Ala, Asp, Glu, Lys, Leu, Asn, Pro, Gln, Arg, Ser, Thr or Val
  MOD_RES (14)...(14): Xaa = Ala, Cys, Asp, Glu, Phe, Gly, His, Ile, Lys, Leu, Met, Asn, Pro, Gln, Arg, Ser, Thr, Val or Tyr
  MOD_RES (15)...(15): Xaa = Ala, Asp, Glu, Phe, Gly, His, Ile, Lys, Leu, Met, Asn, Pro, Gln, Arg, Ser, Thr, Val, Trp or Tyr
  MOD_RES (16)...(16): Xaa = Ala, Asp, Glu, Phe, Gly, His, Ile, Lys, Leu, Asn, Pro, Gln, Arg, Ser, Thr, Val or Trp
  MOD_RES (17)...(17): Xaa = Ala, Asp, Glu, Gly, His, Lys, Leu, Met, Asn, Gln, Arg, Ser, Thr, Val, Trp or Tyr
  MOD_RES (18)...(18): Xaa = Ala, Phe, His, Ile, Leu, Pro, Arg, Thr, Val or Tyr
  MOD_RES (19)...(19): Xaa = Ala, Asp, Glu, Phe, His, Ile, Lys, Leu, Met, Asn, Gln, Arg, Ser, Thr, Val, Trp or Tyr
  MOD_RES (21)...(21): Xaa = Ala, Asp, Glu, Phe, Gly, His, Ile, Lys, Leu, Met, Asn, Pro, Gln, Arg, Ser, Thr, Val, Trp or Tyr
  MOD_RES (23)...(23): Xaa = Ala, Asp, Glu, Phe, Gly, His, Ile, Lys, Leu, Asn, Pro, Gln, Arg, Ser, Thr, Val or Tyr
  MOD_RES (24)...(24): Xaa = Ala, Asp, Glu, Phe, His, Ile, Lys, Leu, Met, Asn, Pro, Gln, Arg, Ser, Thr or Val
  MOD_RES (25)...(25): Xaa = Asp, Glu, Gly, Asn, Pro or Ser
  MOD_RES (26)...(26): Xaa = Ala, Asp, Glu, Phe, His, Leu, Met, Gln, Arg, Ser, Thr, Trp or Tyr
  MOD_RES (27)...(27): Xaa = Ala, Asp, Glu, Phe, Gly, His, Ile, Lys, Leu, Met, Asn, Gln, Arg, Ser, Thr, Val or Tyr
  MOD_RES (28)...(28): Xaa = Ala, Phe, Gly, Ile, Lys, Leu, Met, Pro, Gln, Arg, Ser, Thr, Val, Trp or Tyr
  MOD_RES (29)...(29): Xaa = Ala, Asp, Glu, Phe, Gly, His, Lys, Leu, Met, Asn, Pro, Gln, Arg, Ser, Thr, Val or Trp
  MOD_RES (30)...(30): Xaa = Ala, Asp, Glu, Gly, Ile, Lys, Leu, Met, Asn, Pro, Gln, Arg, Ser, Thr, Val or Tyr
  MOD_RES (31)...(31): Xaa = Ala, Asp, Glu, Phe, Gly, His, Ile, Lys, Leu, Met, Asn, Gln, Ser, Thr or Val
  MOD_RES (32)...(32): Xaa = Glu, Phe, Gly, His, Ile, Lys, Leu, Met, Asn, Pro, Gln, Arg, Ser, Thr or Trp
CXXXXCXXXXCXXXXXXXXCXCXXXXXXXXXXC

SEQ ID NO: 251 - protein, 34 aa, Artificial Sequence
  EGF domain monomer sequence
  MOD_RES (2)...(2): Xaa = Ala, Asp, Glu, Phe, Gly, His, Ile, Lys, Leu, Asn, Pro, Gln, Arg, Ser, Thr, Val or Trp
  MOD_RES (3)...(3): Xaa = Ala, Asp, Glu, Gly, His, Lys, Leu, Met, Asn, Pro, Arg, Ser, Thr or Tyr
  MOD_RES (4)...(4): Xaa = Ala, Asp, Glu, Gly, His, Lys, Leu, Met, Asn, Pro, Gln, Arg, Ser, Thr, Val or Trp
  MOD_RES (5)...(5): Xaa = Ala, Glu, Gly, Met, Asn, Pro, Gln, Arg, Ser, Thr or Tyr
  MOD_RES (7)...(7): Xaa = Ala, Asp, Glu, Phe, Gly, His, Ile, Lys, Leu, Met, Asn, Pro, Gln, Arg, Ser, Thr or Val
  MOD_RES (8)...(8): Xaa = Ala, Asp, Glu, Phe, Gly, His, Lys, Leu, Asn, Pro, Gln, Arg, Ser, Thr or Tyr
  MOD_RES (9)...(9): Xaa = Ala, Gly or Thr
  MOD_RES (10)...(10): Xaa = Ala, Asp, Glu, Phe, His, Ile, Lys, Leu, Met, Asn, Gln, Arg, Ser, Thr or Val
  MOD_RES (12)...(12): Xaa = Ala, Asp, Glu, Phe, Gly, His, Ile, Lys, Leu, Met, Asn, Gln, Arg, Ser, Thr, Val, Trp or Tyr
  MOD_RES (13)...(13): Xaa = Ala, Asp, Glu, Lys, Leu, Asn, Pro, Gln, Arg, Ser, Thr or Val
  MOD_RES (14)...(14): Xaa = Ala, Cys, Asp, Glu, Phe, Gly, His, Ile, Lys, Leu, Met, Asn, Pro, Gln, Arg, Ser, Thr, Val or Tyr
  MOD_RES (15)...(15): Xaa = Ala, Asp, Glu, Phe, Gly, His, Ile, Lys, Leu, Met, Asn, Pro, Gln, Arg, Ser, Thr, Val, Trp or Tyr
  MOD_RES (16)...(16): Xaa = Ala, Asp, Glu, Phe, Gly, His, Ile, Lys, Leu, Asn, Pro, Gln, Arg, Ser, Thr, Val or Trp
  MOD_RES (17)...(17): Xaa = Ala, Asp, Glu, Gly, His, Lys, Leu, Met, Asn, Gln, Arg, Ser, Thr, Val, Trp or Tyr
  MOD_RES (18)...(18): Xaa = Ala, Phe, His, Ile, Leu, Pro, Arg, Thr, Val or Tyr
  MOD_RES (19)...(19): Xaa = Ala, Asp, Glu, Phe, His, Ile, Lys, Leu, Met, Asn, Gln, Arg, Ser, Thr, Val, Trp or Tyr
  MOD_RES (21)...(21): Xaa = Ala, Asp, Glu, Phe, Gly, His, Ile, Lys, Leu, Met, Asn, Pro, Gln, Arg, Ser, Thr, Val, Trp or Tyr
  MOD_RES (23)...(23): Xaa = Ala, Asp, Glu, Phe, Gly, His, Ile, Lys, Leu, Asn, Pro, Gln, Arg, Ser, Thr, Val or Tyr
  MOD_RES (24)...(24): Xaa = Ala, Asp, Glu, Phe, His, Ile, Lys, Leu, Met, Asn, Pro, Gln, Arg, Ser, Thr or Val
  MOD_RES (25)...(25): Xaa = Asp, Glu, Gly, Asn, Pro or Ser
  MOD_RES (26)...(26): Xaa = Ala, Asp, Glu, Phe, His, Leu, Met, Gln, Arg, Ser, Thr, Trp or Tyr
  MOD_RES (27)...(27): Xaa = Ala, Asp, Glu, Phe, Gly, His, Ile, Lys, Leu, Met, Asn, Gln, Arg, Ser, Thr, Val or Tyr
  MOD_RES (28)...(28): Xaa = Ala, Phe, Gly, Ile, Lys, Leu, Met, Pro, Gln, Arg, Ser, Thr, Val, Trp or Tyr
  MOD_RES (29)...(29): Xaa = Ala, Asp, Glu, Phe, Gly, His, Lys, Leu, Met, Asn, Pro, Gln, Arg, Ser, Thr, Val or Trp
  MOD_RES (30)...(30): Xaa = Ala, Asp, Glu, Gly, Ile, Lys, Leu, Met, Asn, Pro, Gln, Arg, Ser, Thr, Val or Tyr
  MOD_RES (31)...(31): Xaa = Ala, Asp, Glu, Phe, Gly, His, Ile, Lys, Leu, Met, Asn, Gln, Ser, Thr or Val
  MOD_RES (32)...(32): Xaa = Glu, Phe, Gly, His, Ile, Lys, Leu, Met, Asn, Pro, Gln, Arg, Ser, Thr or Trp
  MOD_RES (33)...(33): Xaa = Ala, Asp, Glu, Phe, Gly, His, Lys, Leu, Met, Asn, Pro, Gln, Arg, Ser, Thr, Val or Tyr
CXXXXCXXXXCXXXXXXXXCXCXXXXXXXXXXXC

SEQ ID NO: 252 - protein, 35 aa, Artificial Sequence
  EGF domain monomer sequence
  MOD_RES (2)...(2): Xaa = Ala, Asp, Glu, Phe, Gly, His, Ile, Lys, Leu, Asn, Pro, Gln, Arg, Ser, Thr, Val or Trp
  MOD_RES (3)...(3): Xaa = Ala, Asp, Glu, Gly, His, Lys, Leu, Met, Asn, Pro, Arg, Ser, Thr or Tyr
  MOD_RES (4)...(4): Xaa = Ala, Asp, Glu, Gly, His, Lys, Leu, Met, Asn, Pro, Gln, Arg, Ser, Thr, Val or Trp
  MOD_RES (5)...(5): Xaa = Ala, Glu, Gly, Met, Asn, Pro, Gln, Arg, Ser, Thr or Tyr
  MOD_RES (7)...(7): Xaa = Ala, Asp, Glu, Phe, Gly, His, Ile, Lys, Leu, Met, Asn, Pro, Gln, Arg, Ser, Thr or Val
  MOD_RES (8)...(8): Xaa = Ala, Asp, Glu, Phe, Gly, His, Lys, Leu, Asn, Pro, Gln, Arg, Ser, Thr or Tyr
  MOD_RES (9)...(9): Xaa = Ala, Gly or Thr
  MOD_RES (10)...(10): Xaa = Ala, Asp, Glu, Phe, His, Ile, Lys, Leu, Met, Asn, Gln, Arg, Ser, Thr or Val
  MOD_RES (12)...(12): Xaa = Ala, Asp, Glu, Phe, Gly, His, Ile, Lys, Leu, Met, Asn, Gln, Arg, Ser, Thr, Val, Trp or Tyr
  MOD_RES (13)...(13): Xaa = Ala, Asp, Glu, Lys, Leu, Asn, Pro, Gln, Arg, Ser, Thr or Val
  MOD_RES (14)...(14): Xaa = Ala, Cys, Asp, Glu, Phe, Gly, His, Ile, Lys, Leu, Met, Asn, Pro, Gln, Arg, Ser, Thr, Val or Tyr
  MOD_RES (15)...(15): Xaa = Ala, Asp, Glu, Phe, Gly, His, Ile, Lys, Leu, Met, Asn, Pro, Gln, Arg, Ser, Thr, Val, Trp or Tyr
  MOD_RES (16)...(16): Xaa = Ala, Asp, Glu, Phe, Gly, His, Ile, Lys, Leu, Asn, Pro, Gln, Arg, Ser, Thr, Val or Trp
  MOD_RES (17)...(17): Xaa = Ala, Asp, Glu, Gly, His, Lys, Leu, Met, Asn, Gln, Arg, Ser, Thr, Val, Trp or Tyr
  MOD_RES (18)...(18): Xaa = Ala, Phe, His, Ile, Leu, Pro, Arg, Thr, Val or Tyr
  MOD_RES (19)...(19): Xaa = Ala, Asp, Glu, Phe, His, Ile, Lys, Leu, Met, Asn, Gln, Arg, Ser, Thr, Val, Trp or Tyr
  MOD_RES (21)...(21): Xaa = Ala, Asp, Glu, Phe, Gly, His, Ile, Lys, Leu, Met, Asn, Pro, Gln, Arg, Ser, Thr, Val, Trp or Tyr
  MOD_RES (23)...(23): Xaa = Ala, Asp, Glu, Phe, Gly, His, Ile, Lys, Leu, Asn, Pro, Gln, Arg, Ser, Thr, Val or Tyr
  MOD_RES (24)...(24): Xaa = Ala, Asp, Glu, Phe, His, Ile, Lys, Leu, Met, Asn, Pro, Gln, Arg, Ser, Thr or Val
  MOD_RES (25)...(25): Xaa = Asp, Glu, Gly, Asn, Pro or Ser
  MOD_RES (26)...(26): Xaa = Ala, Asp, Glu, Phe, His, Leu, Met, Gln, Arg, Ser, Thr, Trp or Tyr
  MOD_RES (27)...(27): Xaa = Ala, Asp, Glu, Phe, Gly, His, Ile, Lys, Leu, Met, Asn, Gln, Arg, Ser, Thr, Val or Tyr
  MOD_RES (28)...(28): Xaa = Ala, Phe, Gly, Ile, Lys, Leu, Met, Pro, Gln, Arg, Ser, Thr, Val, Trp or Tyr
  MOD_RES (29)...(29): Xaa = Ala, Asp, Glu, Phe, Gly, His, Lys, Leu, Met, Asn, Pro, Gln, Arg, Ser, Thr, Val or Trp
  MOD_RES (30)...(30): Xaa = Ala, Asp, Glu, Gly, Ile, Lys, Leu, Met, Asn, Pro, Gln, Arg, Ser, Thr, Val or Tyr
  MOD_RES (31)...(31): Xaa = Ala, Asp, Glu, Phe, Gly, His, Ile, Lys, Leu, Met, Asn, Gln, Ser, Thr or Val
  MOD_RES (32)...(32): Xaa = Glu, Phe, Gly, His, Ile, Lys, Leu, Met, Asn, Pro, Gln, Arg, Ser, Thr or Trp
  MOD_RES (33)...(33): Xaa = Ala, Asp, Glu, Phe, Gly, His, Lys, Leu, Met, Asn, Pro, Gln, Arg, Ser, Thr, Val or Tyr
  MOD_RES (34)...(34): Xaa = Ala, Asp, Glu, Phe, Gly, His, Ile, Lys, Met, Asn, Gln, Arg, Ser, Thr, Val or Tyr
CXXXXCXXXXCXXXXXXXXCXCXXXXXXXXXXXXC

SEQ ID NO: 253 - protein, 32 aa, Artificial Sequence
  EGF domain monomer sequence
  MOD_RES (2)...(2): Xaa = Ala, Asp, Glu, Phe, Gly, His, Ile, Lys, Leu, Asn, Pro, Gln, Arg, Ser, Thr, Val or Trp
  MOD_RES (3)...(3): Xaa = Ala, Asp, Glu, Gly, His, Lys, Leu, Met, Asn, Pro, Arg, Ser, Thr or Tyr
  MOD_RES (4)...(4): Xaa = Ala, Asp, Glu, Gly, His, Lys, Leu, Met, Asn, Pro, Gln, Arg, Ser, Thr, Val or Trp
  MOD_RES (5)...(5): Xaa = Ala, Glu, Gly, Met, Asn, Pro, Gln, Arg, Ser, Thr or Tyr
  MOD_RES (7)...(7): Xaa = Ala, Cys, Asp, Glu, Phe, Gly, His, Lys, Leu, Met, Asn, Pro, Gln, Arg, Ser, Val or Tyr
  MOD_RES (8)...(8): Xaa = Ala, Asp, Glu, Gly, His, Ile, Lys, Leu, Met, Asn, Pro, Gln, Arg, Ser, Thr, Val or Tyr
  MOD_RES (9)...(9): Xaa = Ala, Asp, Glu, Phe, Gly, His, Lys, Leu, Asn, Gln, Arg, Ser, Thr or Tyr
  MOD_RES (10)...(10): Xaa = Ala, Phe, Gly, His, Gln, Ser, Thr or Val
  MOD_RES (11)...(11): Xaa = Ala, Asp, Glu, Phe, His, Ile, Lys, Leu, Met, Asn, Gln, Arg, Ser, Thr or Val
  MOD_RES (13)...(13): Xaa = Ala, Asp, Glu, Phe, Gly, His, Ile, Lys, Leu, Met, Asn, Gln, Arg, Ser, Thr, Val, Trp or Tyr
  MOD_RES (14)...(14): Xaa = Ala, Asp, Glu, Lys, Leu, Asn, Pro, Gln, Arg, Ser, Thr or Val
  MOD_RES (15)...(15): Xaa = Ala, Cys, Asp, Glu, Phe, Gly, His, Ile, Lys, Leu, Met, Asn, Pro, Gln, Arg, Ser, Thr, Val or Tyr
  MOD_RES (16)...(16): Xaa = Ala, Asp, Glu, Phe, Gly, His, Ile, Lys, Leu, Met, Asn, Pro, Gln, Arg, Ser, Thr, Val, Trp or Tyr
  MOD_RES (17)...(17): Xaa = Ala, Asp, Glu, Phe, Gly, His, Ile, Lys, Leu, Asn, Pro, Gln, Arg, Ser, Thr, Val or Trp
  MOD_RES (18)...(18): Xaa = Ala, Asp, Glu, Gly, His, Lys, Leu, Met, Asn, Gln, Arg, Ser, Thr, Val, Trp or Tyr
  MOD_RES (19)...(19): Xaa = Ala, Phe, His, Ile, Leu, Pro, Arg, Thr, Val or Tyr
  MOD_RES (20)...(20): Xaa = Ala, Asp, Glu, Phe, His, Ile, Lys, Leu, Met, Asn, Gln, Arg, Ser, Thr, Val, Trp or Tyr
  MOD_RES (22)...(22): Xaa = Ala, Asp, Glu, Phe, Gly, His, Ile, Lys, Leu, Met, Asn, Pro, Gln, Arg, Ser, Thr, Val, Trp or Tyr
  MOD_RES (24)...(24): Xaa = Ala, Asp, Glu, Phe, His, Lys, Leu, Met, Asn, Pro, Gln, Arg, Ser, Thr, Val, Trp or Tyr
  MOD_RES (25)...(25): Xaa = Ala, Asp, Glu, Phe, Gly, His, Lys, Leu, Asn, Pro, Gln, Arg, Ser, Thr, Val or Tyr
  MOD_RES (26)...(26): Xaa = Ala, Glu, Gly, His, Lys, Leu, Asn, Pro, Arg, Ser, Thr or Tyr
  MOD_RES (27)...(27): Xaa = Phe, His, Ile, Leu, Met, Arg, Thr, Trp or Tyr
  MOD_RES (28)...(28): Xaa = Ala, Asp, Glu, Phe, Gly, His, Ile, Lys, Leu, Met, Asn, Gln, Arg, Ser, Thr, Val or Tyr
  MOD_RES (29)...(29): Xaa = Asp, Gly or Ser
  MOD_RES (30)...(30): Xaa = Ala, Asp, Glu, Phe, His, Ile, Lys, Leu, Asn, Pro, Gln, Arg, Ser, Thr, Val or Tyr
  MOD_RES (31)...(31): Xaa = Ala, Asp, Glu, Phe, His, Ile, Lys, Leu, Met, Asn, Gln, Arg, Ser, Thr or Tyr
CXXXXCXXXXXCXXXXXXXXCXCXXXXXXXXC

SEQ ID NO: 254 - protein, 33 aa, Artificial Sequence
  EGF domain monomer sequence
  MOD_RES (2)...(2): Xaa = Ala, Asp, Glu, Phe, Gly, His, Ile, Lys, Leu, Asn, Pro, Gln, Arg, Ser, Thr, Val or Trp
  MOD_RES (3)...(3): Xaa = Ala, Asp, Glu, Gly, His, Lys, Leu, Met, Asn, Pro, Arg, Ser, Thr or Tyr
  MOD_RES (4)...(4): Xaa = Ala, Asp, Glu, Gly, His, Lys, Leu, Met, Asn, Pro, Gln, Arg, Ser, Thr, Val or Trp
  MOD_RES (5)...(5): Xaa = Ala, Glu, Gly, Met, Asn, Pro, Gln, Arg, Ser, Thr or Tyr
  MOD_RES (7)...(7): Xaa = Ala, Cys, Asp, Glu, Phe, Gly, His, Lys, Leu, Met, Asn, Pro, Gln, Arg, Ser, Val or Tyr
  MOD_RES (8)...(8): Xaa = Ala, Asp, Glu, Gly, His, Ile, Lys, Leu, Met, Asn, Pro, Gln, Arg, Ser, Thr, Val or Tyr
  MOD_RES (9)...(9): Xaa = Ala, Asp, Glu, Phe, Gly, His, Lys, Leu, Asn, Gln, Arg, Ser, Thr or Tyr
  MOD_RES (10)...(10): Xaa = Ala, Phe, Gly, His, Gln, Ser, Thr or Val
  MOD_RES (11)...(11): Xaa = Ala, Asp, Glu, Phe, His, Ile, Lys, Leu, Met, Asn, Gln, Arg, Ser, Thr or Val
  MOD_RES (13)...(13): Xaa = Ala, Asp, Glu, Phe, Gly, His, Ile, Lys, Leu, Met, Asn, Gln, Arg, Ser, Thr, Val, Trp or Tyr
  MOD_RES (14)...(14): Xaa = Ala, Asp, Glu, Lys, Leu, Asn, Pro, Gln, Arg, Ser, Thr or Val
  MOD_RES (15)...(15): Xaa = Ala, Cys, Asp, Glu, Phe, Gly, His, Ile, Lys, Leu, Met, Asn, Pro, Gln, Arg, Ser, Thr, Val or Tyr
  MOD_RES (16)...(16): Xaa = Ala, Asp, Glu, Phe, Gly, His, Ile, Lys, Leu, Met, Asn, Pro, Gln, Arg, Ser, Thr, Val, Trp or Tyr
  MOD_RES (17)...(17): Xaa = Ala, Asp, Glu, Phe, Gly, His, Ile, Lys, Leu, Asn, Pro, Gln, Arg, Ser, Thr, Val or Trp
  MOD_RES (18)...(18): Xaa = Ala, Asp, Glu, Gly, His, Lys, Leu, Met, Asn, Gln, Arg, Ser, Thr, Val, Trp or Tyr
  MOD_RES (19)...(19): Xaa = Ala, Phe, His, Ile, Leu, Pro, Arg, Thr, Val or Tyr
  MOD_RES (20)...(20): Xaa = Ala, Asp, Glu, Phe, His, Ile, Lys, Leu, Met, Asn, Gln, Arg, Ser, Thr, Val, Trp or Tyr
  MOD_RES (22)...(22): Xaa = Ala, Asp, Glu, Phe, Gly, His, Ile, Lys, Leu, Met, Asn, Pro, Gln, Arg, Ser, Thr, Val, Trp or Tyr
  MOD_RES (24)...(24): Xaa = Ala, Asp, Glu, Phe, Gly, His, Ile, Lys, Leu, Asn, Pro, Gln, Arg, Ser, Thr, Val or Tyr
  MOD_RES (25)...(25): Xaa = Ala, Asp, Glu, Phe, His, Ile, Lys, Leu, Met, Asn, Pro, Gln, Arg, Ser, Thr or Val
  MOD_RES (26)...(26): Xaa = Asp, Glu, Gly, Asn, Pro or Ser
  MOD_RES (27)...(27): Xaa = Ala, Asp, Glu, Phe, His, Leu, Met, Gln, Arg, Ser, Thr, Trp or Tyr
  MOD_RES (28)...(28): Xaa = Ala, Asp, Glu, Phe, Gly, His, Ile, Lys, Leu, Met, Asn, Gln, Arg, Ser, Thr, Val or Tyr
  MOD_RES (29)...(29): Xaa = Ala, Phe, Gly, Ile, Lys, Leu, Met, Pro, Gln, Arg, Ser, Thr, Val, Trp or Tyr
  MOD_RES (30)...(30): Xaa = Ala, Asp, Glu, Phe, Gly, His, Lys, Leu, Met, Asn, Pro, Gln, Arg, Ser, Thr, Val or Trp
  MOD_RES (31)...(31): Xaa = Ala, Asp, Glu, Gly, Ile, Lys, Leu, Met, Asn, Pro, Gln, Arg, Ser, Thr, Val or Tyr
  MOD_RES (32)...(32): Xaa = Ala, Asp, Glu, Phe, Gly, His, Ile, Lys, Leu, Met, Asn, Gln, Ser, Thr or Val
CXXXXCXXXXXCXXXXXXXXCXCXXXXXXXXXC

SEQ ID NO: 255 - protein, 34 aa, Artificial Sequence
  EGF domain monomer sequence
  MOD_RES (2)...(2): Xaa = Ala, Asp, Glu, Phe, Gly, His, Ile, Lys, Leu, Asn, Pro, Gln, Arg, Ser, Thr, Val or Trp
  MOD_RES (3)...(3): Xaa = Ala, Asp, Glu, Gly, His, Lys, Leu, Met, Asn, Pro, Arg, Ser, Thr or Tyr
  MOD_RES (4)...(4): Xaa = Ala, Asp, Glu, Gly, His, Lys, Leu, Met, Asn, Pro, Gln, Arg, Ser, Thr, Val or Trp
  MOD_RES (5)...(5): Xaa = Ala, Glu, Gly, Met, Asn, Pro, Gln, Arg, Ser, Thr or Tyr
  MOD_RES (7)...(7): Xaa = Ala, Cys, Asp, Glu, Phe, Gly, His, Lys, Leu, Met, Asn, Pro, Gln, Arg, Ser, Val or Tyr
  MOD_RES (8)...(8): Xaa = Ala, Asp, Glu, Gly, His, Ile, Lys, Leu, Met, Asn, Pro, Gln, Arg, Ser, Thr, Val or Tyr
  MOD_RES (9)...(9): Xaa = Ala, Asp, Glu, Phe, Gly, His, Lys, Leu, Asn, Gln, Arg, Ser, Thr or Tyr
  MOD_RES (10)...(10): Xaa = Ala, Phe, Gly, His, Gln, Ser, Thr or Val
  MOD_RES (11)...(11): Xaa = Ala, Asp, Glu, Phe, His, Ile, Lys, Leu, Met, Asn, Gln, Arg, Ser, Thr or Val
  MOD_RES (13)...(13): Xaa = Ala, Asp, Glu, Phe, Gly, His, Ile, Lys, Leu, Met, Asn, Gln, Arg, Ser, Thr, Val, Trp or Tyr
  MOD_RES (14)...(14): Xaa = Ala, Asp, Glu, Lys, Leu, Asn, Pro, Gln, Arg, Ser, Thr or Val
  MOD_RES (15)...(15): Xaa = Ala, Cys, Asp, Glu, Phe, Gly, His, Ile, Lys, Leu, Met, Asn, Pro, Gln, Arg, Ser, Thr, Val or Tyr
  MOD_RES (16)...(16): Xaa = Ala, Asp, Glu, Phe, Gly, His, Ile, Lys, Leu, Met, Asn, Pro, Gln, Arg, Ser, Thr, Val, Trp or Tyr
  MOD_RES (17)...(17): Xaa = Ala, Asp, Glu, Phe, Gly, His, Ile, Lys, Leu, Asn, Pro, Gln, Arg, Ser, Thr, Val or Trp
  MOD_RES (18)...(18): Xaa = Ala, Asp, Glu, Gly, His, Lys, Leu, Met, Asn, Gln, Arg, Ser, Thr, Val, Trp or Tyr
  MOD_RES (19)...(19): Xaa = Ala, Phe, His, Ile, Leu, Pro, Arg, Thr, Val or Tyr
  MOD_RES (20)...(20): Xaa = Ala, Asp, Glu, Phe, His, Ile, Lys, Leu, Met, Asn, Gln, Arg, Ser, Thr, Val, Trp or Tyr
  MOD_RES (22)...(22): Xaa = Ala, Asp, Glu, Phe, Gly, His, Ile, Lys, Leu, Met, Asn, Pro, Gln, Arg, Ser, Thr, Val, Trp or Tyr
  MOD_RES (24)...(24): Xaa = Ala, Asp, Glu, Phe, Gly, His, Ile, Lys, Leu, Asn, Pro, Gln, Arg, Ser, Thr, Val or Tyr
  MOD_RES (25)...(25): Xaa = Ala, Asp, Glu, Phe, His, Ile, Lys, Leu, Met, Asn, Pro, Gln, Arg, Ser, Thr or Val
  MOD_RES (26)...(26): Xaa = Asp, Glu, Gly, Asn, Pro or Ser
  MOD_RES (27)...(27): Xaa = Ala, Asp, Glu, Phe, His, Leu, Met, Gln, Arg, Ser, Thr, Trp or Tyr
  MOD_RES (28)...(28): Xaa = Ala, Asp, Glu, Phe, Gly, His, Ile, Lys, Leu, Met, Asn, Gln, Arg, Ser, Thr, Val or Tyr
  MOD_RES (29)...(29): Xaa = Ala, Phe, Gly, Ile, Lys, Leu, Met, Pro, Gln, Arg, Ser, Thr, Val, Trp or Tyr
  MOD_RES (30)...(30): Xaa = Ala, Asp, Glu, Phe, Gly, His, Lys, Leu, Met, Asn, Pro, Gln, Arg, Ser, Thr, Val or Trp
  MOD_RES (31)...(31): Xaa = Ala, Asp, Glu, Gly, Ile, Lys, Leu, Met, Asn, Pro, Gln, Arg, Ser, Thr, Val or Tyr
  MOD_RES (32)...(32): Xaa = Ala, Asp, Glu, Phe, Gly, His, Ile, Lys, Leu, Met, Asn, Gln, Ser, Thr or Val
  MOD_RES (33)...(33): Xaa = Glu, Phe, Gly, His, Ile, Lys, Leu, Met, Asn, Pro, Gln, Arg, Ser, Thr or Trp
CXXXXCXXXXXCXXXXXXXXCXCXXXXXXXXXXC

SEQ ID NO: 256 - protein, 35 aa, Artificial Sequence
  EGF domain monomer sequence
  MOD_RES (2)...(2): Xaa = Ala, Asp, Glu, Phe, Gly, His, Ile, Lys, Leu, Asn, Pro, Gln, Arg, Ser, Thr, Val or Trp
  MOD_RES (3)...(3): Xaa = Ala, Asp, Glu, Gly, His, Lys, Leu, Met, Asn, Pro, Arg, Ser, Thr or Tyr
  MOD_RES (4)...(4): Xaa = Ala, Asp, Glu, Gly, His, Lys, Leu, Met, Asn, Pro, Gln, Arg, Ser, Thr, Val or Trp
  MOD_RES (5)...(5): Xaa = Ala, Glu, Gly, Met, Asn, Pro, Gln, Arg, Ser, Thr or Tyr
  MOD_RES (7)...(7): Xaa = Ala, Cys, Asp, Glu, Phe, Gly, His, Lys, Leu, Met, Asn, Pro, Gln, Arg, Ser, Val or Tyr
  MOD_RES (8)...(8): Xaa = Ala, Asp, Glu, Gly, His, Ile, Lys, Leu, Met, Asn, Pro, Gln, Arg, Ser, Thr, Val or Tyr
  MOD_RES (9)...(9): Xaa = Ala, Asp, Glu, Phe, Gly, His, Lys, Leu, Asn, Gln, Arg, Ser, Thr or Tyr
  MOD_RES (10)...(10): Xaa = Ala, Phe, Gly, His, Gln, Ser, Thr or Val
  MOD_RES (11)...(11): Xaa = Ala, Asp, Glu, Phe, His, Ile, Lys, Leu, Met, Asn, Gln, Arg, Ser, Thr or Val
  MOD_RES (13)...(13): Xaa = Ala, Asp, Glu, Phe, Gly, His, Ile, Lys, Leu, Met, Asn, Gln, Arg, Ser, Thr, Val, Trp or Tyr
  MOD_RES (14)...(14): Xaa = Ala, Asp, Glu, Lys, Leu, Asn, Pro, Gln, Arg, Ser, Thr or Val
  MOD_RES (15)...(15): Xaa = Ala, Cys, Asp, Glu, Phe, Gly, His, Ile, Lys, Leu, Met, Asn, Pro, Gln, Arg, Ser, Thr, Val or Tyr
  MOD_RES (16)...(16): Xaa = Ala, Asp, Glu, Phe, Gly, His, Ile, Lys, Leu, Met, Asn, Pro, Gln, Arg, Ser, Thr, Val, Trp or Tyr
  MOD_RES (17)...(17): Xaa = Ala, Asp, Glu, Phe, Gly, His, Ile, Lys, Leu, Asn, Pro, Gln, Arg, Ser, Thr, Val or Trp
  MOD_RES (18)...(18): Xaa = Ala, Asp, Glu, Gly, His, Lys, Leu, Met, Asn, Gln, Arg, Ser, Thr, Val, Trp or Tyr
  MOD_RES (19)...(19): Xaa = Ala, Phe, His, Ile, Leu, Pro, Arg, Thr, Val or Tyr
  MOD_RES (20)...(20): Xaa = Ala, Asp, Glu, Phe, His, Ile, Lys, Leu, Met, Asn, Gln, Arg, Ser, Thr, Val, Trp or Tyr
  MOD_RES (22)...(22): Xaa = Ala, Asp, Glu, Phe, Gly, His, Ile, Lys, Leu, Met, Asn, Pro, Gln, Arg, Ser, Thr, Val, Trp or Tyr
  MOD_RES (24)...(24): Xaa = Ala, Asp, Glu, Phe, Gly, His, Ile, Lys, Leu, Asn, Pro, Gln, Arg, Ser, Thr, Val or Tyr
  MOD_RES (25)...(25): Xaa = Ala, Asp, Glu, Phe, His, Ile, Lys, Leu, Met, Asn, Pro, Gln, Arg, Ser, Thr or Val
  MOD_RES (26)...(26): Xaa = Asp, Glu, Gly, Asn, Pro or Ser
  MOD_RES (27)...(27): Xaa = Ala, Asp, Glu, Phe, His, Leu, Met, Gln, Arg, Ser, Thr, Trp or Tyr
  MOD_RES (28)...(28): Xaa = Ala, Asp, Glu, Phe, Gly, His, Ile, Lys, Leu, Met, Asn, Gln, Arg, Ser, Thr, Val or Tyr
  MOD_RES (29)...(29): Xaa = Ala, Phe, Gly, Ile, Lys, Leu, Met, Pro, Gln, Arg, Ser, Thr, Val, Trp or Tyr
  MOD_RES (30)...(30): Xaa = Ala, Asp, Glu, Phe, Gly, His, Lys, Leu, Met, Asn, Pro, Gln, Arg, Ser, Thr, Val or Trp
  MOD_RES (31)...(31): Xaa = Ala, Asp, Glu, Gly, Ile, Lys, Leu, Met, Asn, Pro, Gln, Arg, Ser, Thr, Val or Tyr
  MOD_RES (32)...(32): Xaa = Ala, Asp, Glu, Phe, Gly, His, Ile, Lys, Leu, Met, Asn, Gln, Ser, Thr or Val
  MOD_RES (33)...(33): Xaa = Glu, Phe, Gly, His, Ile, Lys, Leu, Met, Asn, Pro, Gln, Arg, Ser, Thr or Trp
  MOD_RES (34)...(34): Xaa = Ala, Asp, Glu, Phe, Gly, His, Lys, Leu, Met, Asn, Pro, Gln, Arg, Ser, Thr, Val or Tyr
CXXXXCXXXXXCXXXXXXXXCXCXXXXXXXXXXXC

SEQ ID NO: 257 - protein, 36 aa, Artificial Sequence
  EGF domain monomer sequence
  MOD_RES (2)...(2): Xaa = Ala, Asp, Glu, Phe, Gly, His, Ile, Lys, Leu, Asn, Pro, Gln, Arg, Ser, Thr, Val or Trp
  MOD_RES (3)...(3): Xaa = Ala, Asp, Glu, Gly, His, Lys, Leu, Met, Asn, Pro, Arg, Ser, Thr or Tyr
  MOD_RES (4)...(4): Xaa = Ala, Asp, Glu, Gly, His, Lys, Leu, Met, Asn, Pro, Gln, Arg, Ser, Thr, Val or Trp
  MOD_RES (5)...(5): Xaa = Ala, Glu, Gly, Met, Asn, Pro, Gln, Arg, Ser, Thr or Tyr
  MOD_RES (7)...(7): Xaa = Ala, Cys, Asp, Glu, Phe, Gly, His, Lys, Leu, Met, Asn, Pro, Gln, Arg, Ser, Val or Tyr
  MOD_RES (8)...(8): Xaa = Ala, Asp, Glu, Gly, His, Ile, Lys, Leu, Met, Asn, Pro, Gln, Arg, Ser, Thr, Val or Tyr
  MOD_RES (9)...(9): Xaa = Ala, Asp, Glu, Phe, Gly, His, Lys, Leu, Asn, Gln, Arg, Ser, Thr or Tyr
  MOD_RES (10)...(10): Xaa = Ala, Phe, Gly, His, Gln, Ser, Thr or Val
  MOD_RES (11)...(11): Xaa = Ala, Asp, Glu, Phe, His, Ile, Lys, Leu, Met, Asn, Gln, Arg, Ser, Thr or Val
  MOD_RES (13)...(13): Xaa = Ala, Asp, Glu, Phe, Gly, His, Ile, Lys, Leu, Met, Asn, Gln, Arg, Ser, Thr, Val, Trp or Tyr
  MOD_RES (14)...(14): Xaa = Ala, Asp, Glu, Lys, Leu, Asn, Pro, Gln, Arg, Ser, Thr or Val
  MOD_RES (15)...(15): Xaa = Ala, Cys, Asp, Glu, Phe, Gly, His, Ile, Lys, Leu, Met, Asn, Pro, Gln, Arg, Ser, Thr, Val or Tyr
  MOD_RES (16)...(16): Xaa = Ala, Asp, Glu, Phe, Gly, His, Ile, Lys, Leu, Met, Asn, Pro, Gln, Arg, Ser, Thr, Val, Trp or Tyr
  MOD_RES (17)...(17): Xaa = Ala, Asp, Glu, Phe, Gly, His, Ile, Lys, Leu, Asn, Pro, Gln, Arg, Ser, Thr, Val or Trp
  MOD_RES (18)...(18): Xaa = Ala, Asp, Glu, Gly, His, Lys, Leu, Met, Asn, Gln, Arg, Ser, Thr, Val, Trp or Tyr
  MOD_RES (19)...(19): Xaa = Ala, Phe, His, Ile, Leu, Pro, Arg, Thr, Val or Tyr
  MOD_RES (20)...(20): Xaa = Ala, Asp, Glu, Phe, His, Ile, Lys, Leu, Met, Asn, Gln, Arg, Ser, Thr, Val, Trp or Tyr
  MOD_RES (22)...(22): Xaa = Ala, Asp, Glu, Phe, Gly, His, Ile, Lys, Leu, Met, Asn, Pro, Gln, Arg, Ser, Thr, Val, Trp or Tyr
  MOD_RES (24)...(24): Xaa = Ala, Asp, Glu, Phe, Gly, His, Ile, Lys, Leu, Asn, Pro, Gln, Arg, Ser, Thr, Val or Tyr
  MOD_RES (25)...(25): Xaa = Ala, Asp, Glu, Phe, His, Ile, Lys, Leu, Met, Asn, Pro, Gln, Arg, Ser, Thr or Val
  MOD_RES (26)...(26): Xaa = Asp, Glu, Gly, Asn, Pro or Ser
  MOD_RES (27)...(27): Xaa = Ala, Asp, Glu, Phe, His, Leu, Met, Gln, Arg, Ser, Thr, Trp or Tyr
  MOD_RES (28)...(28): Xaa = Ala, Asp, Glu, Phe, Gly, His, Ile, Lys, Leu, Met, Asn, Gln, Arg, Ser, Thr, Val or Tyr
  MOD_RES (29)...(29): Xaa = Ala, Phe, Gly, Ile, Lys, Leu, Met, Pro, Gln, Arg, Ser, Thr, Val, Trp or Tyr
  MOD_RES (30)...(30): Xaa = Ala, Asp, Glu, Phe, Gly, His, Lys, Leu, Met, Asn, Pro, Gln, Arg, Ser, Thr, Val or Trp
  MOD_RES (31)...(31): Xaa = Ala, Asp, Glu, Gly, Ile, Lys, Leu, Met, Asn, Pro, Gln, Arg, Ser, Thr, Val or Tyr
  MOD_RES (32)...(32): Xaa = Ala, Asp, Glu, Phe, Gly, His, Ile, Lys, Leu, Met, Asn, Gln, Ser, Thr or Val
  MOD_RES (33)...(33): Xaa = Glu, Phe, Gly, His, Ile, Lys, Leu, Met, Asn, Pro, Gln, Arg, Ser, Thr or Trp
  MOD_RES (34)...(34): Xaa = Ala, Asp, Glu, Phe, Gly, His, Lys, Leu, Met, Asn, Pro, Gln, Arg, Ser, Thr, Val or Tyr
  MOD_RES (35)...(35): Xaa = Ala, Asp, Glu, Phe, Gly, His, Ile, Lys, Met, Asn, Gln, Arg, Ser, Thr, Val or Tyr
CXXXXCXXXXXCXXXXXXXXCXCXXXXXXXXXXXXC

SEQ ID NO: 258 - protein, 31 aa, Artificial Sequence
  EGF domain monomer sequence
  MOD_RES (2)...(2): Xaa = Ala, Asp, Glu, Phe, Gly, His, Ile, Lys, Leu, Asn, Pro, Gln, Arg, Ser, Thr, Val or Trp
  MOD_RES (3)...(3): Xaa = Ala, Asp, Glu, Gly, His, Lys, Leu, Met, Asn, Pro, Arg, Ser, Thr or Tyr
  MOD_RES (4)...(4): Xaa = Ala, Asp, Glu, Gly, His, Lys, Leu, Met, Asn, Pro, Gln, Arg, Ser, Thr, Val or Trp
  MOD_RES (5)...(5): Xaa = Ala, Glu, Gly, Met, Asn, Pro, Gln, Arg, Ser, Thr or Tyr
  MOD_RES (7)...(7): Xaa = Ala, Asp, Glu, Gly, His, Lys, Asn, Pro, Gln, Ser, Thr or Val
  MOD_RES (8)...(8): Xaa = Phe, Gly, His, Leu, Asn, Gln, Ser, Thr or Tyr
  MOD_RES (9)...(9): Xaa = Ala, Asp, Glu, Phe, Gly, His, Ile, Lys, Leu, Asn, Gln, Arg, Ser, Thr, Val or Tyr
  MOD_RES (11)...(11): Xaa = Ala, Asp, Phe, His, Ile, Lys, Leu, Met, Asn, Gln, Arg, Ser, Thr, Val or Tyr
  MOD_RES (12)...(12): Xaa = Ala, Asp, Glu, Phe, His, Leu, Met, Asn, Pro, Gln, Arg, Ser, Val or Tyr
  MOD_RES (13)...(13): Xaa = Ala, Asp, Glu, Phe, Gly, His, Leu, Asn, Arg, Ser, Thr, Val or Tyr
  MOD_RES (14)...(14): Xaa = Ala, Asp, Glu, Gly, Asn, Pro, Gln, Arg, Ser or Thr
  MOD_RES (15)...(15): Xaa = Ala, Asp, Glu, Phe, Gly, Lys, Leu, Asn, Pro, Gln, Arg, Ser or Thr
  MOD_RES (16)...(16): Xaa = Ala, Asp, Glu, Gly, Met, Asn, Arg, Ser, Thr, Val or Tyr
  MOD_RES (17)...(17): Xaa = Ala, Asp, Glu, Gly, Lys, Leu, Met, Gln, Arg, Ser or Thr
  MOD_RES (18)...(18): Xaa = Phe, His, Ile, Pro, Arg, Val, Trp or Tyr
  MOD_RES (19)...(19): Xaa = Ala, Glu, His, Lys, Leu, Gln, Ser, Thr, Val or Tyr
  MOD_RES (21)...(21): Xaa = Ala, Asp, Glu, Phe, Gly, His, Ile, Lys, Leu, Met, Asn, Pro, Gln, Arg, Ser, Thr, Val, Trp or Tyr
  MOD_RES (23)...(23): Xaa = Ala, Asp, Glu, Phe, His, Lys, Leu, Met, Asn, Pro, Gln, Arg, Ser, Thr, Val, Trp or Tyr
  MOD_RES (24)...(24): Xaa = Ala, Asp, Glu, Phe, Gly, His, Lys, Leu, Asn, Pro, Gln, Arg, Ser, Thr, Val or Tyr
  MOD_RES (25)...(25): Xaa = Ala, Glu, Gly, His, Lys, Leu, Asn, Pro, Arg, Ser, Thr or Tyr
  MOD_RES (26)...(26): Xaa = Phe, His, Ile, Leu, Met, Arg, Thr, Trp or Tyr
  MOD_RES (27)...(27): Xaa = Ala, Asp, Glu, Phe, Gly, His, Ile, Lys, Leu, Met, Asn, Gln, Arg, Ser, Thr, Val or Tyr
  MOD_RES (28)...(28): Xaa = Asp, Gly or Ser
  MOD_RES (29)...(29): Xaa = Ala, Asp, Glu, Phe, His, Ile, Lys, Leu, Asn, Pro, Gln, Arg, Ser, Thr, Val or Tyr
  MOD_RES (30)...(30): Xaa = Ala, Asp, Glu, Phe, His, Ile, Lys, Leu, Met, Asn, Gln, Arg, Ser, Thr or Tyr
CXXXXCXXXCXXXXXXXXXCXCXXXXXXXXC

SEQ ID NO: 259 - protein, 32 aa, Artificial Sequence
  EGF domain monomer sequence
  MOD_RES (2)...(2): Xaa = Ala, Asp, Glu, Phe, Gly, His, Ile, Lys, Leu, Asn, Pro, Gln, Arg, Ser, Thr, Val or Trp
  MOD_RES (3)...(3): Xaa = Ala, Asp, Glu, Gly, His, Lys, Leu, Met, Asn, Pro, Arg, Ser, Thr or Tyr
  MOD_RES (4)...(4): Xaa = Ala, Asp, Glu, Gly, His, Lys, Leu, Met, Asn, Pro, Gln, Arg, Ser, Thr, Val or Trp
  MOD_RES (5)...(5): Xaa = Ala, Glu, Gly, Met, Asn, Pro, Gln, Arg, Ser, Thr or Tyr
  MOD_RES (7)...(7): Xaa = Ala, Asp, Glu, Gly, His, Lys, Asn, Pro, Gln, Ser, Thr or Val
  MOD_RES (8)...(8): Xaa = Phe, Gly, His, Leu, Asn, Gln, Ser, Thr or Tyr
  MOD_RES (9)...(9): Xaa = Ala, Asp, Glu, Phe, Gly, His, Ile, Lys, Leu, Asn, Gln, Arg, Ser, Thr, Val or Tyr
  MOD_RES (11)...(11): Xaa = Ala, Asp, Phe, His, Ile, Lys, Leu, Met, Asn, Gln, Arg, Ser, Thr, Val or Tyr
  MOD_RES (12)...(12): Xaa = Ala, Asp, Glu, Phe, His, Leu, Met, Asn, Pro, Gln, Arg, Ser, Val or Tyr
  MOD_RES (13)...(13): Xaa = Ala, Asp, Glu, Phe, Gly, His, Leu, Asn, Arg, Ser, Thr, Val or Tyr
  MOD_RES (14)...(14): Xaa = Ala, Asp, Glu, Gly, Asn, Pro, Gln, Arg, Ser or Thr
  MOD_RES (15)...(15): Xaa = Ala, Asp, Glu, Phe, Gly, Lys, Leu, Asn, Pro, Gln, Arg, Ser or Thr
  MOD_RES (16)...(16): Xaa = Ala, Asp, Glu, Gly, Met, Asn, Arg, Ser, Thr, Val or Tyr
  MOD_RES (17)...(17): Xaa = Ala, Asp, Glu, Gly, Lys, Leu, Met, Gln, Arg, Ser or Thr
  MOD_RES (18)...(18): Xaa = Phe, His, Ile, Pro, Arg, Val, Trp or Tyr
  MOD_RES (19)...(19): Xaa = Ala, Glu, His, Lys, Leu, Gln, Ser, Thr, Val or Tyr
  MOD_RES (21)...(21): Xaa = Ala, Asp, Glu, Phe, Gly, His, Ile, Lys, Leu, Met, Asn, Pro, Gln, Arg, Ser, Thr, Val, Trp or Tyr
  MOD_RES (23)...(23): Xaa = Ala, Asp, Glu, Phe, Gly, His, Ile, Lys, Leu, Asn, Pro, Gln, Arg, Ser, Thr, Val or Tyr
  MOD_RES (24)...(24): Xaa = Ala, Asp, Glu, Phe, His, Ile, Lys, Leu, Met, Asn, Pro, Gln, Arg, Ser, Thr or Val
  MOD_RES (25)...(25): Xaa = Asp, Glu, Gly, Asn, Pro or Ser
  MOD_RES (26)...(26): Xaa = Ala, Asp, Glu, Phe, His, Leu, Met, Gln, Arg, Ser, Thr, Trp or Tyr
  MOD_RES (27)...(27): Xaa = Ala, Asp, Glu, Phe, Gly, His, Ile, Lys, Leu, Met, Asn, Gln, Arg, Ser, Thr, Val or Tyr
  MOD_RES (28)...(28): Xaa = Ala, Phe, Gly, Ile, Lys, Leu, Met, Pro, Gln, Arg, Ser, Thr, Val, Trp or Tyr
  MOD_RES (29)...(29): Xaa = Ala, Asp, Glu, Phe, Gly, His, Lys, Leu, Met, Asn, Pro, Gln, Arg, Ser, Thr, Val or Trp
  MOD_RES (30)...(30): Xaa = Ala, Asp, Glu, Gly, Ile, Lys, Leu, Met, Asn, Pro, Gln, Arg, Ser, Thr, Val or Tyr
  MOD_RES (31)...(31): Xaa = Ala, Asp, Glu, Phe, Gly, His, Ile, Lys, Leu, Met, Asn, Gln, Ser, Thr or Val
CXXXXCXXXCXXXXXXXXXCXCXXXXXXXXXC

SEQ ID NO: 260 - protein, 33 aa, Artificial Sequence
  EGF domain monomer sequence
  MOD_RES (2)...(2): Xaa = Ala, Asp, Glu, Phe, Gly, His, Ile, Lys, Leu, Asn, Pro, Gln, Arg, Ser, Thr, Val or Trp
  MOD_RES (3)...(3): Xaa = Ala, Asp, Glu, Gly, His, Lys, Leu, Met, Asn, Pro, Arg, Ser, Thr or Tyr
  MOD_RES (4)...(4): Xaa = Ala, Asp, Glu, Gly, His, Lys, Leu, Met, Asn, Pro, Gln, Arg, Ser, Thr, Val or Trp
  MOD_RES (5)...(5): Xaa = Ala, Glu, Gly, Met, Asn, Pro, Gln, Arg, Ser, Thr or Tyr
  MOD_RES (7)...(7): Xaa = Ala, Asp, Glu, Gly, His, Lys, Asn, Pro, Gln, Ser, Thr or Val
  MOD_RES (8)...(8): Xaa = Phe, Gly, His, Leu, Asn, Gln, Ser, Thr or Tyr
  MOD_RES (9)...(9): Xaa = Ala, Asp, Glu, Phe, Gly, His, Ile, Lys, Leu, Asn, Gln, Arg, Ser, Thr, Val or Tyr
  MOD_RES (11)...(11): Xaa = Ala, Asp, Phe, His, Ile, Lys, Leu, Met, Asn, Gln, Arg, Ser, Thr, Val or Tyr
  MOD_RES (12)...(12): Xaa = Ala, Asp, Glu, Phe, His, Leu, Met, Asn, Pro, Gln, Arg, Ser, Val or Tyr
  MOD_RES (13)...(13): Xaa = Ala, Asp, Glu, Phe, Gly, His, Leu, Asn, Arg, Ser, Thr, Val or Tyr
  MOD_RES (14)...(14): Xaa = Ala, Asp, Glu, Gly, Asn, Pro, Gln, Arg, Ser or Thr
  MOD_RES (15)...(15): Xaa = Ala, Asp, Glu, Phe, Gly, Lys, Leu, Asn, Pro, Gln, Arg, Ser or Thr
  MOD_RES (16)...(16): Xaa = Ala, Asp, Glu, Gly, Met, Asn, Arg, Ser, Thr, Val or Tyr
  MOD_RES (17)...(17): Xaa = Ala, Asp, Glu, Gly, Lys, Leu, Met, Gln, Arg, Ser or Thr
  MOD_RES (18)...(18): Xaa = Phe, His, Ile, Pro, Arg, Val, Trp or Tyr
  MOD_RES (19)...(19): Xaa = Ala, Glu, His, Lys, Leu, Gln, Ser, Thr, Val or Tyr
  MOD_RES (21)...(21): Xaa = Ala, Asp, Glu, Phe, Gly, His, Ile, Lys, Leu, Met, Asn, Pro, Gln, Arg, Ser, Thr, Val, Trp or Tyr
  MOD_RES (23)...(23): Xaa = Ala, Asp, Glu, Phe, Gly, His, Ile, Lys, Leu, Asn, Pro, Gln, Arg, Ser, Thr, Val or Tyr
  MOD_RES (24)...(24): Xaa = Ala, Asp, Glu, Phe, His, Ile, Lys, Leu, Met, Asn, Pro, Gln, Arg, Ser, Thr or Val
  MOD_RES (25)...(25): Xaa = Asp, Glu, Gly, Asn, Pro or Ser
  MOD_RES (26)...(26): Xaa = Ala, Asp, Glu, Phe, His, Leu, Met, Gln, Arg, Ser, Thr, Trp or Tyr
  MOD_RES (27)...(27): Xaa = Ala, Asp, Glu, Phe, Gly, His, Ile, Lys, Leu, Met, Asn, Gln, Arg, Ser, Thr, Val or Tyr
  MOD_RES (28)...(28): Xaa = Ala, Phe, Gly, Ile, Lys, Leu, Met, Pro, Gln, Arg, Ser, Thr, Val, Trp or Tyr
  MOD_RES (29)...(29): Xaa = Ala, Asp, Glu, Phe, Gly, His, Lys, Leu, Met, Asn, Pro, Gln, Arg, Ser, Thr, Val or Trp
  MOD_RES (30)...(30): Xaa = Ala, Asp, Glu, Gly, Ile, Lys, Leu, Met, Asn, Pro, Gln, Arg, Ser, Thr, Val or Tyr
  MOD_RES (31)...(31): Xaa = Ala, Asp, Glu, Phe, Gly, His, Ile, Lys, Leu, Met, Asn, Gln, Ser, Thr or Val
  MOD_RES (32)...(32): Xaa = Glu, Phe, Gly, His, Ile, Lys, Leu, Met, Asn, Pro, Gln, Arg, Ser, Thr or Trp
CXXXXCXXXCXXXXXXXXXCXCXXXXXXXXXXC

SEQ ID NO: 261 - protein, 34 aa, Artificial Sequence
  EGF domain monomer sequence
  MOD_RES (2)...(2): Xaa = Ala, Asp, Glu, Phe, Gly, His, Ile, Lys, Leu, Asn, Pro, Gln, Arg, Ser, Thr, Val or Trp
  MOD_RES (3)...(3): Xaa = Ala, Asp, Glu, Gly, His, Lys, Leu, Met, Asn, Pro, Arg, Ser, Thr or Tyr
  MOD_RES (4)...(4): Xaa = Ala, Asp, Glu, Gly, His, Lys, Leu, Met, Asn, Pro, Gln, Arg, Ser, Thr, Val or Trp
  MOD_RES (5)...(5): Xaa = Ala, Glu, Gly, Met, Asn, Pro, Gln, Arg, Ser, Thr or Tyr
  MOD_RES (7)...(7): Xaa = Ala, Asp, Glu, Gly, His, Lys, Asn, Pro, Gln, Ser, Thr or Val
  MOD_RES (8)...(8): Xaa = Phe, Gly, His, Leu, Asn, Gln, Ser, Thr or Tyr
  MOD_RES (9)...(9): Xaa = Ala, Asp, Glu, Phe, Gly, His, Ile, Lys, Leu, Asn, Gln, Arg, Ser, Thr, Val or Tyr
  MOD_RES (11)...(11): Xaa = Ala, Asp, Phe, His, Ile, Lys, Leu, Met, Asn, Gln, Arg, Ser, Thr, Val or Tyr
  MOD_RES (12)...(12): Xaa = Ala, Asp, Glu, Phe, His, Leu, Met, Asn, Pro, Gln, Arg, Ser, Val or Tyr
  MOD_RES (13)...(13): Xaa = Ala, Asp, Glu, Phe, Gly, His, Leu, Asn, Arg, Ser, Thr, Val or Tyr
  MOD_RES (14)...(14): Xaa = Ala, Asp, Glu, Gly, Asn, Pro, Gln, Arg, Ser or Thr
  MOD_RES (15)...(15): Xaa = Ala, Asp, Glu, Phe, Gly, Lys, Leu, Asn, Pro, Gln, Arg, Ser or Thr
  MOD_RES (16)...(16): Xaa = Ala, Asp, Glu, Gly, Met, Asn, Arg, Ser, Thr, Val or Tyr
  MOD_RES (17)...(17): Xaa = Ala, Asp, Glu, Gly, Lys, Leu, Met, Gln, Arg, Ser or Thr
  MOD_RES (18)...(18): Xaa = Phe, His, Ile, Pro, Arg, Val, Trp or Tyr
  MOD_RES (19)...(19): Xaa = Ala, Glu, His, Lys, Leu, Gln, Ser, Thr, Val or Tyr
  MOD_RES (21)...(21): Xaa = Ala, Asp, Glu, Phe, Gly, His, Ile, Lys, Leu, Met, Asn, Pro, Gln, Arg, Ser, Thr, Val, Trp or Tyr
  MOD_RES (23)...(23): Xaa = Ala, Asp, Glu, Phe, Gly, His, Ile, Lys, Leu, Asn, Pro, Gln, Arg, Ser, Thr, Val or Tyr
  MOD_RES (24)...(24): Xaa = Ala, Asp, Glu, Phe, His, Ile, Lys, Leu, Met, Asn, Pro, Gln, Arg, Ser, Thr or Val
  MOD_RES (25)...(25): Xaa = Asp, Glu, Gly, Asn, Pro or Ser
  MOD_RES (26)...(26): Xaa = Ala, Asp, Glu, Phe, His, Leu, Met, Gln, Arg, Ser, Thr, Trp or Tyr
  MOD_RES (27)...(27): Xaa = Ala, Asp, Glu, Phe, Gly, His, Ile, Lys, Leu, Met, Asn, Gln, Arg, Ser, Thr, Val or Tyr
  MOD_RES (28)...(28): Xaa = Ala, Phe, Gly, Ile, Lys, Leu, Met, Pro, Gln, Arg, Ser, Thr, Val, Trp or Tyr
  MOD_RES (29)...(29): Xaa = Ala, Asp, Glu, Phe, Gly, His, Lys, Leu, Met, Asn, Pro, Gln, Arg, Ser, Thr, Val or Trp
  MOD_RES (30)...(30): Xaa = Ala, Asp, Glu, Gly, Ile, Lys, Leu, Met, Asn, Pro, Gln, Arg, Ser, Thr, Val or Tyr
  MOD_RES (31)...(31): Xaa = Ala, Asp, Glu, Phe, Gly, His, Ile, Lys, Leu, Met, Asn, Gln, Ser, Thr or Val
  MOD_RES (32)...(32): Xaa = Glu, Phe, Gly, His, Ile, Lys, Leu, Met, Asn, Pro, Gln, Arg, Ser, Thr or Trp
  MOD_RES (33)...(33): Xaa = Ala, Asp, Glu, Phe, Gly, His, Lys, Leu, Met, Asn, Pro, Gln, Arg, Ser, Thr, Val or Tyr
CXXXXCXXXCXXXXXXXXXCXCXXXXXXXXXXXC

SEQ ID NO: 262 - protein, 35 aa, Artificial Sequence
  EGF domain monomer sequence
  MOD_RES (2)...(2): Xaa = Ala, Asp, Glu, Phe, Gly, His, Ile, Lys, Leu, Asn, Pro, Gln, Arg, Ser, Thr, Val or Trp
  MOD_RES (3)...(3): Xaa = Ala, Asp, Glu, Gly, His, Lys, Leu, Met, Asn, Pro, Arg, Ser, Thr or Tyr
  MOD_RES (4)...(4): Xaa = Ala, Asp, Glu, Gly, His, Lys, Leu, Met, Asn, Pro, Gln, Arg, Ser, Thr, Val or Trp
  MOD_RES (5)...(5): Xaa = Ala, Glu, Gly, Met, Asn, Pro, Gln, Arg, Ser, Thr or Tyr
  MOD_RES (7)...(7): Xaa = Ala, Asp, Glu, Gly, His, Lys, Asn, Pro, Gln, Ser, Thr or Val
  MOD_RES (8)...(8): Xaa = Phe, Gly, His, Leu, Asn, Gln, Ser, Thr or Tyr
  MOD_RES (9)...(9): Xaa = Ala, Asp, Glu, Phe, Gly, His, Ile, Lys, Leu, Asn, Gln, Arg, Ser, Thr, Val or Tyr
  MOD_RES (11)...(11): Xaa = Ala, Asp, Phe, His, Ile, Lys, Leu, Met, Asn, Gln, Arg, Ser, Thr, Val or Tyr
  MOD_RES (12)...(12): Xaa = Ala, Asp, Glu, Phe, His, Leu, Met, Asn, Pro, Gln, Arg, Ser, Val or Tyr
  MOD_RES (13)...(13): Xaa = Ala, Asp, Glu, Phe, Gly, His, Leu, Asn, Arg, Ser, Thr, Val or Tyr
  MOD_RES (14)...(14): Xaa = Ala, Asp, Glu, Gly, Asn, Pro, Gln, Arg, Ser or Thr
  MOD_RES (15)...(15): Xaa = Ala, Asp, Glu, Phe, Gly, Lys, Leu, Asn, Pro, Gln, Arg, Ser or Thr
  MOD_RES (16)...(16): Xaa = Ala, Asp, Glu, Gly, Met, Asn, Arg, Ser, Thr, Val or Tyr
  MOD_RES (17)...(17): Xaa = Ala, Asp, Glu, Gly, Lys, Leu, Met, Gln, Arg, Ser or Thr
  MOD_RES (18)...(18): Xaa = Phe, His, Ile, Pro, Arg, Val, Trp or Tyr
  MOD_RES (19)...(19): Xaa = Ala, Glu, His, Lys, Leu, Gln, Ser, Thr, Val or Tyr
  MOD_RES (21)...(21): Xaa = Ala, Asp, Glu, Phe, Gly, His, Ile, Lys, Leu, Met, Asn, Pro, Gln, Arg, Ser, Thr, Val, Trp or Tyr
  MOD_RES (23)...(23): Xaa = Ala, Asp, Glu, Phe, Gly, His, Ile, Lys, Leu, Asn, Pro, Gln, Arg, Ser, Thr, Val or Tyr
  MOD_RES (24)...(24): Xaa = Ala, Asp, Glu, Phe, His, Ile, Lys, Leu, Met, Asn, Pro, Gln, Arg, Ser, Thr or Val
  MOD_RES (25)...(25): Xaa = Asp, Glu, Gly, Asn, Pro or Ser
  MOD_RES (26)...(26): Xaa = Ala, Asp, Glu, Phe, His, Leu, Met, Gln, Arg, Ser, Thr, Trp or Tyr
  MOD_RES (27)...(27): Xaa = Ala, Asp, Glu, Phe, Gly, His, Ile, Lys, Leu, Met, Asn, Gln, Arg, Ser, Thr, Val or Tyr
  MOD_RES (28)...(28): Xaa = Ala, Phe, Gly, Ile, Lys, Leu, Met, Pro, Gln, Arg, Ser, Thr, Val, Trp or Tyr
  MOD_RES (29)...(29): Xaa = Ala, Asp, Glu, Phe, Gly, His, Lys, Leu, Met, Asn, Pro, Gln, Arg, Ser, Thr, Val or Trp
  MOD_RES (30)...(30): Xaa = Ala, Asp, Glu, Gly, Ile, Lys, Leu, Met, Asn, Pro, Gln, Arg, Ser, Thr, Val or Tyr
  MOD_RES (31)...(31): Xaa = Ala, Asp, Glu, Phe, Gly, His, Ile, Lys, Leu, Met, Asn, Gln, Ser, Thr or Val
  MOD_RES (32)...(32): Xaa = Glu, Phe, Gly, His, Ile, Lys, Leu, Met, Asn, Pro, Gln, Arg, Ser, Thr or Trp
  MOD_RES (33)...(33): Xaa = Ala, Asp, Glu, Phe, Gly, His, Lys, Leu, Met, Asn, Pro, Gln, Arg, Ser, Thr, Val or Tyr
  MOD_RES (34)...(34): Xaa = Ala, Asp, Glu, Phe, Gly, His, Ile, Lys, Met, Asn, Gln, Arg, Ser, Thr, Val or Tyr
CXXXXCXXXCXXXXXXXXXCXCXXXXXXXXXXXXC

SEQ ID NO: 263 - protein, 32 aa, Artificial Sequence
  EGF domain monomer sequence
  MOD_RES (2)...(2): Xaa = Ala, Asp, Glu, Gly, Ile, Lys, Leu, Gln, Arg, Ser, Thr or Val
  MOD_RES (3)...(3): Xaa = Ala, Asp, Glu, Phe, Gly, His, Ile, Lys, Leu, Met, Asn, Pro, Gln, Arg, Ser, Thr or Val
  MOD_RES (4)...(4): Xaa = Ala, Glu, Phe, Gly, His, Leu, Asn, Pro, Gln, Arg, Ser, Thr, Trp or Tyr
  MOD_RES (5)...(5): Xaa = Ala, Asp, Glu, Phe, Gly, His, Ile, Lys, Leu, Asn, Pro, Arg, Ser or Thr
  MOD_RES (6)...(6): Xaa = Ala, Phe, Gly, Ile, Lys, Leu, Met, Asn, Pro, Gln, Arg, Ser, Thr, Val or Tyr
  MOD_RES (8)...(8): Xaa = Ala, Asp, Glu, Phe, Gly, His, Ile, Lys, Leu, Met, Asn, Pro, Gln, Arg, Ser, Thr or Val
  MOD_RES (9)...(9): Xaa = Ala, Asp, Glu, Phe, Gly, His, Lys, Leu, Asn, Pro, Gln, Arg, Ser, Thr or Tyr
  MOD_RES (10)...(10): Xaa = Ala, Gly or Thr
  MOD_RES (11)...(11): Xaa = Ala, Asp, Glu, Phe, His, Ile, Lys, Leu, Met, Asn, Gln, Arg, Ser, Thr or Val
  MOD_RES (13)...(13): Xaa = Ala, Asp, Glu, Phe, Gly, His, Ile, Lys, Leu, Met, Asn, Gln, Arg, Ser, Thr, Val, Trp or Tyr
  MOD_RES (14)...(14): Xaa = Ala, Asp, Glu, Lys, Leu, Asn, Pro, Gln, Arg, Ser, Thr or Val
  MOD_RES (15)...(15): Xaa = Ala, Cys, Asp, Glu, Phe, Gly, His, Ile, Lys, Leu, Met, Asn, Pro, Gln, Arg, Ser, Thr, Val or Tyr
  MOD_RES (16)...(16): Xaa = Ala, Asp, Glu, Phe, Gly, His, Ile, Lys, Leu, Met, Asn, Pro, Gln, Arg, Ser, Thr, Val, Trp or Tyr
  MOD_RES (17)...(17): Xaa = Ala, Asp, Glu, Phe, Gly, His, Ile, Lys, Leu, Asn, Pro, Gln, Arg, Ser, Thr, Val or Trp
  MOD_RES (18)...(18): Xaa = Ala, Asp, Glu, Gly, His, Lys, Leu, Met, Asn, Gln, Arg, Ser, Thr, Val, Trp or Tyr
  MOD_RES (19)...(19): Xaa = Ala, Phe, His, Ile, Leu, Pro, Arg, Thr, Val or Tyr
  MOD_RES (20)...(20): Xaa = Ala, Asp, Glu, Phe, His, Ile, Lys, Leu, Met, Asn, Gln, Arg, Ser, Thr, Val, Trp or Tyr
  MOD_RES (22)...(22): Xaa = Ala, Asp, Glu, Phe, Gly, His, Ile, Lys, Leu, Met, Asn, Pro, Gln, Arg, Ser, Thr, Val, Trp or Tyr
  MOD_RES (24)...(24): Xaa = Ala, Asp, Glu, Phe, His, Lys, Leu, Met, Asn, Pro, Gln, Arg, Ser, Thr, Val, Trp or Tyr
  MOD_RES (25)...(25): Xaa = Ala, Asp, Glu, Phe, Gly, His, Lys, Leu, Asn, Pro, Gln, Arg, Ser, Thr, Val or Tyr
  MOD_RES (26)...(26): Xaa = Ala, Glu, Gly, His, Lys, Leu, Asn, Pro, Arg, Ser, Thr or Tyr
  MOD_RES (27)...(27): Xaa = Phe, His, Ile, Leu, Met, Arg, Thr, Trp or Tyr
  MOD_RES (28)...(28): Xaa = Ala, Asp, Glu, Phe, Gly, His, Ile, Lys, Leu, Met, Asn, Gln, Arg, Ser, Thr, Val or Tyr
  MOD_RES (29)...(29): Xaa = Asp, Gly or Ser
  MOD_RES (30)...(30): Xaa = Ala, Asp, Glu, Phe, His, Ile, Lys, Leu, Asn, Pro, Gln, Arg, Ser, Thr, Val or Tyr
  MOD_RES (31)...(31): Xaa = Ala, Asp, Glu, Phe, His, Ile, Lys, Leu, Met, Asn, Gln, Arg, Ser, Thr or Tyr
CXXXXXCXXXXCXXXXXXXXCXCXXXXXXXXC

SEQ ID NO: 264 - protein, 33 aa, Artificial Sequence
  EGF domain monomer sequence
  MOD_RES (2)...(2): Xaa = Ala, Asp, Glu, Gly, Ile, Lys, Leu, Gln, Arg, Ser, Thr or Val
  MOD_RES (3)...(3): Xaa = Ala, Asp, Glu, Phe, Gly, His, Ile, Lys, Leu, Met, Asn, Pro, Gln, Arg, Ser, Thr or Val
  MOD_RES (4)...(4): Xaa = Ala, Glu, Phe, Gly, His, Leu, Asn, Pro, Gln, Arg, Ser, Thr, Trp or Tyr
  MOD_RES (5)...(5): Xaa = Ala, Asp, Glu, Phe, Gly, His, Ile, Lys, Leu, Asn, Pro, Arg, Ser or Thr
  MOD_RES (6)...(6): Xaa = Ala, Phe, Gly, Ile, Lys, Leu, Met, Asn, Pro, Gln, Arg, Ser, Thr, Val or Tyr
  MOD_RES (8)...(8): Xaa = Ala, Asp, Glu, Phe, Gly, His, Ile, Lys, Leu, Met, Asn, Pro, Gln, Arg, Ser, Thr or Val
  MOD_RES (9)...(9): Xaa = Ala, Asp, Glu, Phe, Gly, His, Lys, Leu, Asn, Pro, Gln, Arg, Ser, Thr or Tyr
  MOD_RES (10)...(10): Xaa = Ala, Gly or Thr
  MOD_RES (11)...(11): Xaa = Ala, Asp, Glu, Phe, His, Ile, Lys, Leu, Met, Asn, Gln, Arg, Ser, Thr or Val
  MOD_RES (13)...(13): Xaa = Ala, Asp, Glu, Phe, Gly, His, Ile, Lys, Leu, Met, Asn, Gln, Arg, Ser, Thr, Val, Trp or Tyr
  MOD_RES (14)...(14): Xaa = Ala, Asp, Glu, Lys, Leu, Asn, Pro, Gln, Arg, Ser, Thr or Val
  MOD_RES (15)...(15): Xaa = Ala, Cys, Asp, Glu, Phe, Gly, His, Ile, Lys, Leu, Met, Asn, Pro, Gln, Arg, Ser, Thr, Val or Tyr
  MOD_RES (16)...(16): Xaa = Ala, Asp, Glu, Phe, Gly, His, Ile, Lys, Leu, Met, Asn, Pro, Gln, Arg, Ser, Thr, Val, Trp or Tyr
  MOD_RES (17)...(17): Xaa = Ala, Asp, Glu, Phe, Gly, His, Ile, Lys, Leu, Asn, Pro, Gln, Arg, Ser, Thr, Val or Trp
  MOD_RES (18)...(18): Xaa = Ala, Asp, Glu, Gly, His, Lys, Leu, Met, Asn, Gln, Arg, Ser, Thr, Val, Trp or Tyr
  MOD_RES (19)...(19): Xaa = Ala, Phe, His, Ile, Leu, Pro, Arg, Thr, Val or Tyr
  MOD_RES (20)...(20): Xaa = Ala, Asp, Glu, Phe, His, Ile, Lys, Leu, Met, Asn, Gln, Arg, Ser, Thr, Val, Trp or Tyr
  MOD_RES (22)...(22): Xaa = Ala, Asp, Glu, Phe, Gly, His, Ile, Lys, Leu, Met, Asn, Pro, Gln, Arg, Ser, Thr, Val, Trp or Tyr
  MOD_RES (24)...(24): Xaa = Ala, Asp, Glu, Phe, Gly, His, Ile, Lys, Leu, Asn, Pro, Gln, Arg, Ser, Thr, Val or Tyr
  MOD_RES (25)...(25): Xaa = Ala, Asp, Glu, Phe, His, Ile, Lys, Leu, Met, Asn, Pro, Gln, Arg, Ser, Thr or Val
  MOD_RES (26)...(26): Xaa = Asp, Glu, Gly, Asn, Pro or Ser
  MOD_RES (27)...(27): Xaa = Ala, Asp, Glu, Phe, His, Leu, Met, Gln, Arg, Ser, Thr, Trp or Tyr
  MOD_RES (28)...(28): Xaa = Ala, Asp, Glu, Phe, Gly, His, Ile, Lys, Leu, Met, Asn, Gln, Arg, Ser, Thr, Val or Tyr
  MOD_RES (29)...(29): Xaa = Ala, Phe, Gly, Ile, Lys, Leu, Met, Pro, Gln, Arg, Ser, Thr, Val, Trp or Tyr
  MOD_RES (30)...(30): Xaa = Ala, Asp, Glu, Phe, Gly, His, Lys, Leu, Met, Asn, Pro, Gln, Arg, Ser, Thr, Val or Trp
  MOD_RES (31)...(31): Xaa = Ala, Asp, Glu, Gly, Ile, Lys, Leu, Met, Asn, Pro, Gln, Arg, Ser, Thr, Val or Tyr
  MOD_RES (32)...(32): Xaa = Ala, Asp, Glu, Phe, Gly, His, Ile, Lys, Leu, Met, Asn, Gln, Ser, Thr or Val
CXXXXXCXXXXCXXXXXXXXCXCXXXXXXXXXC

SEQ ID NO: 265 - protein, 34 aa, Artificial Sequence
  EGF domain monomer sequence
  MOD_RES (2)...(2): Xaa = Ala, Asp, Glu, Gly, Ile, Lys, Leu, Gln, Arg, Ser, Thr or Val
  MOD_RES (3)...(3): Xaa = Ala, Asp, Glu, Phe, Gly, His, Ile, Lys, Leu, Met, Asn, Pro, Gln, Arg, Ser, Thr or Val
  MOD_RES (4)...(4): Xaa = Ala, Glu, Phe, Gly, His, Leu, Asn, Pro, Gln, Arg, Ser, Thr, Trp or Tyr
  MOD_RES (5)...(5): Xaa = Ala, Asp, Glu, Phe, Gly, His, Ile, Lys, Leu, Asn, Pro, Arg, Ser or Thr
  MOD_RES (6)...(6): Xaa = Ala, Phe, Gly, Ile, Lys, Leu, Met, Asn, Pro, Gln, Arg, Ser, Thr, Val or Tyr
  MOD_RES (8)...(8): Xaa = Ala, Asp, Glu, Phe, Gly, His, Ile, Lys, Leu, Met, Asn, Pro, Gln, Arg, Ser, Thr or Val
  MOD_RES (9)...(9): Xaa = Ala, Asp, Glu, Phe, Gly, His, Lys, Leu, Asn, Pro, Gln, Arg, Ser, Thr or Tyr
  MOD_RES (10)...(10): Xaa = Ala, Gly or Thr
  MOD_RES (11)...(11): Xaa = Ala, Asp, Glu, Phe, His, Ile, Lys, Leu, Met, Asn, Gln, Arg, Ser, Thr or Val
  MOD_RES (13)...(13): Xaa = Ala, Asp, Glu, Phe, Gly, His, Ile, Lys, Leu, Met, Asn, Gln, Arg, Ser, Thr, Val, Trp or Tyr
  MOD_RES (14)...(14): Xaa = Ala, Asp, Glu, Lys, Leu, Asn, Pro, Gln, Arg, Ser, Thr or Val
  MOD_RES (15)...(15): Xaa = Ala, Cys, Asp, Glu, Phe, Gly, His, Ile, Lys, Leu, Met, Asn, Pro, Gln, Arg, Ser, Thr, Val or Tyr
  MOD_RES (16)...(16): Xaa = Ala, Asp, Glu, Phe, Gly, His, Ile, Lys, Leu, Met, Asn, Pro, Gln, Arg, Ser, Thr, Val, Trp or Tyr
  MOD_RES (17)...(17): Xaa = Ala, Asp, Glu, Phe, Gly, His, Ile, Lys, Leu, Asn, Pro, Gln, Arg, Ser, Thr, Val or Trp
  MOD_RES (18)...(18): Xaa = Ala, Asp, Glu, Gly, His, Lys, Leu, Met, Asn, Gln, Arg, Ser, Thr, Val, Trp or Tyr
  MOD_RES (19)...(19): Xaa = Ala, Phe, His, Ile, Leu, Pro, Arg, Thr, Val or Tyr
  MOD_RES (20)...(20): Xaa = Ala, Asp, Glu, Phe, His, Ile, Lys, Leu, Met, Asn, Gln, Arg, Ser, Thr, Val, Trp or Tyr
  MOD_RES (22)...(22): Xaa = Ala, Asp, Glu, Phe, Gly, His, Ile, Lys, Leu, Met, Asn, Pro, Gln, Arg, Ser, Thr, Val, Trp or Tyr
  MOD_RES (24)...(24): Xaa = Ala, Asp, Glu, Phe, Gly, His, Ile, Lys, Leu, Asn, Pro, Gln, Arg, Ser, Thr, Val or Tyr
  MOD_RES (25)...(25): Xaa = Ala, Asp, Glu, Phe, His, Ile, Lys, Leu, Met, Asn, Pro, Gln, Arg, Ser, Thr or Val
  MOD_RES (26)...(26): Xaa = Asp, Glu, Gly, Asn, Pro or Ser
  MOD_RES (27)...(27): Xaa = Ala, Asp, Glu, Phe, His, Leu, Met, Gln, Arg, Ser, Thr, Trp or Tyr
  MOD_RES (28)...(28): Xaa = Ala, Asp, Glu, Phe, Gly, His, Ile, Lys, Leu, Met, Asn, Gln, Arg, Ser, Thr, Val or Tyr
  MOD_RES (29)...(29): Xaa = Ala, Phe, Gly, Ile, Lys, Leu, Met, Pro, Gln, Arg, Ser, Thr, Val, Trp or Tyr
  MOD_RES (30)...(30): Xaa = Ala, Asp, Glu, Phe, Gly, His, Lys, Leu, Met, Asn, Pro, Gln, Arg, Ser, Thr, Val or Trp
  MOD_RES (31)...(31): Xaa = Ala, Asp, Glu, Gly, Ile, Lys, Leu, Met, Asn, Pro, Gln, Arg, Ser, Thr, Val or Tyr
  MOD_RES (32)...(32): Xaa = Ala, Asp, Glu, Phe, Gly, His, Ile, Lys, Leu, Met, Asn, Gln, Ser, Thr or Val
  MOD_RES (33)...(33): Xaa = Glu, Phe, Gly, His, Ile, Lys, Leu, Met, Asn, Pro, Gln, Arg, Ser, Thr or Trp
CXXXXXCXXXXCXXXXXXXXCXCXXXXXXXXXXC

SEQ ID NO: 266 - protein, 35 aa, Artificial Sequence
  EGF domain monomer sequence
  MOD_RES (2)...(2): Xaa = Ala, Asp, Glu, Gly, Ile, Lys, Leu, Gln, Arg, Ser, Thr or Val
  MOD_RES (3)...(3): Xaa = Ala, Asp, Glu, Phe, Gly, His, Ile, Lys, Leu, Met, Asn, Pro, Gln, Arg, Ser, Thr or Val
  MOD_RES (4)...(4): Xaa = Ala, Glu, Phe, Gly, His, Leu, Asn, Pro, Gln, Arg, Ser, Thr, Trp or Tyr
  MOD_RES (5)...(5): Xaa = Ala, Asp, Glu, Phe, Gly, His, Ile, Lys, Leu, Asn, Pro, Arg, Ser or Thr
  MOD_RES (6)...(6): Xaa = Ala, Phe, Gly, Ile, Lys, Leu, Met, Asn, Pro, Gln, Arg, Ser, Thr, Val or Tyr
  MOD_RES (8)...(8): Xaa = Ala, Asp, Glu, Phe, Gly, His, Ile, Lys, Leu, Met, Asn, Pro, Gln, Arg, Ser, Thr or Val
  MOD_RES (9)...(9): Xaa = Ala, Asp, Glu, Phe, Gly, His, Lys, Leu, Asn, Pro, Gln, Arg, Ser, Thr or Tyr
  MOD_RES (10)...(10): Xaa = Ala, Gly or Thr
  MOD_RES (11)...(11): Xaa = Ala, Asp, Glu, Phe, His, Ile, Lys, Leu, Met, Asn, Gln, Arg, Ser, Thr or Val
  MOD_RES (13)...(13): Xaa = Ala, Asp, Glu, Phe, Gly, His, Ile, Lys, Leu, Met, Asn, Gln, Arg, Ser, Thr, Val, Trp or Tyr
  MOD_RES (14)...(14): Xaa = Ala, Asp, Glu, Lys, Leu, Asn, Pro, Gln, Arg, Ser, Thr or Val
  MOD_RES (15)...(15): Xaa = Ala, Cys, Asp, Glu, Phe, Gly, His, Ile, Lys, Leu, Met, Asn, Pro, Gln, Arg, Ser, Thr, Val or Tyr
  MOD_RES (16)...(16): Xaa = Ala, Asp, Glu, Phe, Gly, His, Ile, Lys, Leu, Met, Asn, Pro, Gln, Arg, Ser, Thr, Val, Trp or Tyr
  MOD_RES (17)...(17): Xaa = Ala, Asp, Glu, Phe, Gly, His, Ile, Lys, Leu, Asn, Pro, Gln, Arg, Ser, Thr, Val or Trp
  MOD_RES (18)...(18): Xaa = Ala, Asp, Glu, Gly, His, Lys, Leu, Met, Asn, Gln, Arg, Ser, Thr, Val, Trp or Tyr
  MOD_RES (19)...(19): Xaa = Ala, Phe, His, Ile, Leu, Pro, Arg, Thr, Val or Tyr
  MOD_RES (20)...(20): Xaa = Ala, Asp, Glu, Phe, His, Ile, Lys, Leu, Met, Asn, Gln, Arg, Ser, Thr, Val, Trp or Tyr
  MOD_RES (22)...(22): Xaa = Ala, Asp, Glu, Phe, Gly, His, Ile, Lys, Leu, Met, Asn, Pro, Gln, Arg, Ser, Thr, Val, Trp or Tyr
  MOD_RES (24)...(24): Xaa = Ala, Asp, Glu, Phe, Gly, His, Ile, Lys, Leu, Asn, Pro, Gln, Arg, Ser, Thr, Val or Tyr
  MOD_RES (25)...(25): Xaa = Ala, Asp, Glu, Phe, His, Ile, Lys, Leu, Met, Asn, Pro, Gln, Arg, Ser, Thr or Val
  MOD_RES (26)...(26): Xaa = Asp, Glu, Gly, Asn, Pro or Ser
  MOD_RES (27)...(27): Xaa = Ala, Asp, Glu, Phe, His, Leu, Met, Gln, Arg, Ser, Thr, Trp or Tyr
  MOD_RES (28)...(28): Xaa = Ala, Asp, Glu, Phe, Gly, His, Ile, Lys, Leu, Met, Asn, Gln, Arg, Ser, Thr, Val or Tyr
  MOD_RES (29)...(29): Xaa = Ala, Phe, Gly, Ile, Lys, Leu, Met, Pro, Gln, Arg, Ser, Thr, Val, Trp or Tyr
  MOD_RES (30)...(30): Xaa = Ala, Asp, Glu, Phe, Gly, His, Lys, Leu, Met, Asn, Pro, Gln, Arg, Ser, Thr, Val or Trp
  MOD_RES (31)...(31): Xaa = Ala, Asp, Glu, Gly, Ile, Lys, Leu, Met, Asn, Pro, Gln, Arg, Ser, Thr, Val or Tyr
  MOD_RES (32)...(32): Xaa = Ala, Asp, Glu, Phe, Gly, His, Ile, Lys, Leu, Met, Asn, Gln, Ser, Thr or Val
  MOD_RES (33)...(33): Xaa = Glu, Phe, Gly, His, Ile, Lys, Leu, Met, Asn, Pro, Gln, Arg, Ser, Thr or Trp
  MOD_RES (34)...(34): Xaa = Ala, Asp, Glu, Phe, Gly, His, Lys, Leu, Met, Asn, Pro, Gln, Arg, Ser, Thr, Val or Tyr
CXXXXXCXXXXCXXXXXXXXCXCXXXXXXXXXXXC

SEQ ID NO: 267 - protein, 36 aa, Artificial Sequence
  EGF domain monomer sequence
  MOD_RES (2)...(2): Xaa = Ala, Asp, Glu, Gly, Ile, Lys, Leu, Gln, Arg, Ser, Thr or Val
  MOD_RES (3)...(3): Xaa = Ala, Asp, Glu, Phe, Gly, His, Ile, Lys, Leu, Met, Asn, Pro, Gln, Arg, Ser, Thr or Val
  MOD_RES (4)...(4): Xaa = Ala, Glu, Phe, Gly, His, Leu, Asn, Pro, Gln, Arg, Ser, Thr, Trp or Tyr
  MOD_RES (5)...(5): Xaa = Ala, Asp, Glu, Phe, Gly, His, Ile, Lys, Leu, Asn, Pro, Arg, Ser or Thr
  MOD_RES (6)...(6): Xaa = Ala, Phe, Gly, Ile, Lys, Leu, Met, Asn, Pro, Gln, Arg, Ser, Thr, Val or Tyr
  MOD_RES (8)...(8): Xaa = Ala, Asp, Glu, Phe, Gly, His, Ile, Lys, Leu, Met, Asn, Pro, Gln, Arg, Ser, Thr or Val
  MOD_RES (9)...(9): Xaa = Ala, Asp, Glu, Phe, Gly, His, Lys, Leu, Asn, Pro, Gln, Arg, Ser, Thr or Tyr
  MOD_RES (10)...(10): Xaa = Ala, Gly or Thr
  MOD_RES (11)...(11): Xaa = Ala, Asp, Glu, Phe, His, Ile, Lys, Leu, Met, Asn, Gln, Arg, Ser, Thr or Val
  MOD_RES (13)...(13): Xaa = Ala, Asp, Glu, Phe, Gly, His, Ile, Lys, Leu, Met, Asn, Gln, Arg, Ser, Thr, Val, Trp or Tyr
  MOD_RES (14)...(14): Xaa = Ala, Asp, Glu, Lys, Leu, Asn, Pro, Gln, Arg, Ser, Thr or Val
  MOD_RES (15)...(15): Xaa = Ala, Cys, Asp, Glu, Phe, Gly, His, Ile, Lys, Leu, Met, Asn, Pro, Gln, Arg, Ser, Thr, Val or Tyr
  MOD_RES (16)...(16): Xaa = Ala, Asp, Glu, Phe, Gly, His, Ile, Lys, Leu, Met, Asn, Pro, Gln, Arg, Ser, Thr, Val, Trp or Tyr
  MOD_RES (17)...(17): Xaa = Ala, Asp, Glu, Phe, Gly, His, Ile, Lys, Leu, Asn, Pro, Gln, Arg, Ser, Thr, Val or Trp
  MOD_RES (18)...(18): Xaa = Ala, Asp, Glu, Gly, His, Lys, Leu, Met, Asn, Gln, Arg, Ser, Thr, Val, Trp or Tyr
  MOD_RES (19)...(19): Xaa = Ala, Phe, His, Ile, Leu, Pro, Arg, Thr, Val or Tyr
  MOD_RES (20)...(20): Xaa = Ala, Asp, Glu, Phe, His, Ile, Lys, Leu, Met, Asn, Gln, Arg, Ser, Thr, Val, Trp or Tyr
  MOD_RES (22)...(22): Xaa = Ala, Asp, Glu, Phe, Gly, His, Ile, Lys, Leu, Met, Asn, Pro, Gln, Arg, Ser, Thr, Val, Trp or Tyr
  MOD_RES (24)...(24): Xaa = Ala, Asp, Glu, Phe, Gly, His, Ile, Lys, Leu, Asn, Pro, Gln, Arg, Ser, Thr, Val or Tyr
  MOD_RES (25)...(25): Xaa = Ala, Asp, Glu, Phe, His, Ile, Lys, Leu, Met, Asn, Pro, Gln, Arg, Ser, Thr or Val
  MOD_RES (26)...(26): Xaa = Asp, Glu, Gly, Asn, Pro or Ser
  MOD_RES (27)...(27): Xaa = Ala, Asp, Glu, Phe, His, Leu, Met, Gln, Arg, Ser, Thr, Trp or Tyr
  MOD_RES (28)...(28): Xaa = Ala, Asp, Glu, Phe, Gly, His, Ile, Lys, Leu, Met, Asn, Gln, Arg, Ser, Thr, Val or Tyr
  MOD_RES (29)...(29): Xaa = Ala, Phe, Gly, Ile, Lys, Leu, Met, Pro, Gln, Arg, Ser, Thr, Val, Trp or Tyr
  MOD_RES (30)...(30): Xaa = Ala, Asp, Glu, Phe, Gly, His, Lys, Leu, Met, Asn, Pro, Gln, Arg, Ser, Thr, Val or Trp
  MOD_RES (31)...(31): Xaa = Ala, Asp, Glu, Gly, Ile, Lys, Leu, Met, Asn, Pro, Gln, Arg, Ser, Thr, Val or Tyr
  MOD_RES (32)...(32): Xaa = Ala, Asp, Glu, Phe, Gly, His, Ile, Lys, Leu, Met, Asn, Gln, Ser, Thr or Val
  MOD_RES (33)...(33): Xaa = Glu, Phe, Gly, His, Ile, Lys, Leu, Met, Asn, Pro, Gln, Arg, Ser, Thr or Trp
  MOD_RES (34)...(34): Xaa = Ala, Asp, Glu, Phe, Gly, His, Lys, Leu, Met, Asn, Pro, Gln, Arg, Ser, Thr, Val or Tyr
  MOD_RES (35)...(35): Xaa = Ala, Asp, Glu, Phe, Gly, His, Ile, Lys, Met, Asn, Gln, Arg, Ser, Thr, Val or Tyr
CXXXXXCXXXXCXXXXXXXXCXCXXXXXXXXXXXXC

SEQ ID NO: 268 - protein, 33 aa, Artificial Sequence
  EGF domain monomer sequence
  MOD_RES (2)...(2): Xaa = Ala, Asp, Glu, Phe, Gly, Ile, Lys, Leu, Met, Asn, Pro, Gln, Arg, Ser, Thr, Val or Tyr
  MOD_RES (3)...(3): Xaa = Ala, Asp, Glu, Phe, Gly, His, Ile, Lys, Leu, Met, Asn, Pro, Gln, Arg, Ser, Thr, Val or Tyr
  MOD_RES (4)...(4): Xaa = Ala, Asp, Glu, Phe, Gly, His, Ile, Lys, Leu, Met, Asn, Pro, Gln, Arg, Ser, Thr, Val or Trp
  MOD_RES (5)...(5): Xaa = Ala, Asp, Glu, Phe, Gly, His, Ile, Lys, Leu, Met, Asn, Pro, Gln, Arg, Ser, Thr or Val
  MOD_RES (6)...(6): Xaa = Ala, Asp, Glu, Phe, Gly, His, Ile, Lys, Leu, Asn, Pro, Gln, Arg, Ser, Val or Tyr
  MOD_RES (7)...(7): Xaa = Ala, Asp, Glu, Gly, Ile, Lys, Leu, Met, Asn, Pro, Gln, Arg, Ser, Thr, Val or Tyr
  MOD_RES (9)...(9): Xaa = Ala, Asp, Glu, Phe, Gly, His, Ile, Lys, Leu, Met, Asn, Pro, Gln, Arg, Ser, Thr or Val
  MOD_RES (10)...(10): Xaa = Ala, Asp, Glu, Phe, Gly, His, Lys, Leu, Asn, Pro, Gln, Arg, Ser, Thr or Tyr
  MOD_RES (11)...(11): Xaa = Ala, Gly or Thr
  MOD_RES (12)...(12): Xaa = Ala, Asp, Glu, Phe, His, Ile, Lys, Leu, Met, Asn, Gln, Arg, Ser, Thr or Val
  MOD_RES (14)...(14): Xaa = Ala, Asp, Glu, Phe, Gly, His, Ile, Lys, Leu, Met, Asn, Gln, Arg, Ser, Thr, Val, Trp or Tyr
  MOD_RES (15)...(15): Xaa = Ala, Asp, Glu, Lys, Leu, Asn, Pro, Gln, Arg, Ser, Thr or Val
  MOD_RES (16)...(16): Xaa = Ala, Cys, Asp, Glu, Phe, Gly, His, Ile, Lys, Leu, Met, Asn, Pro, Gln, Arg, Ser, Thr, Val or Tyr
  MOD_RES (17)...(17): Xaa = Ala, Asp, Glu, Phe, Gly, His, Ile, Lys, Leu, Met, Asn, Pro, Gln, Arg, Ser, Thr, Val, Trp or Tyr
  MOD_RES (18)...(18): Xaa = Ala, Asp, Glu, Phe, Gly, His, Ile, Lys, Leu, Asn, Pro, Gln, Arg, Ser, Thr, Val or Trp
  MOD_RES (19)...(19): Xaa = Ala, Asp, Glu, Gly, His, Lys, Leu, Met, Asn, Gln, Arg, Ser, Thr, Val, Trp or Tyr
  MOD_RES (20)...(20): Xaa = Ala, Phe, His, Ile, Leu, Pro, Arg, Thr, Val or Tyr
  MOD_RES (21)...(21): Xaa = Ala, Asp, Glu, Phe, His, Ile, Lys, Leu, Met, Asn, Gln, Arg, Ser, Thr, Val, Trp or Tyr
  MOD_RES (23)...(23): Xaa = Ala, Asp, Glu, Phe, Gly, His, Ile, Lys, Leu, Met, Asn, Pro, Gln, Arg, Ser, Thr, Val, Trp or Tyr
  MOD_RES (25)...(25): Xaa = Ala, Asp, Glu, Phe, His, Lys, Leu, Met, Asn, Pro, Gln, Arg, Ser, Thr, Val, Trp or Tyr
  MOD_RES (26)...(26): Xaa = Ala, Asp, Glu, Phe, Gly, His, Lys, Leu, Asn, Pro, Gln, Arg, Ser, Thr, Val or Tyr
  MOD_RES (27)...(27): Xaa = Ala, Glu, Gly, His, Lys, Leu, Asn, Pro, Arg, Ser, Thr or Tyr
  MOD_RES (28)...(28): Xaa = Phe, His, Ile, Leu, Met, Arg, Thr, Trp or Tyr
  MOD_RES (29)...(29): Xaa = Ala, Asp, Glu, Phe, Gly, His, Ile, Lys, Leu, Met, Asn, Gln, Arg, Ser, Thr, Val or Tyr
  MOD_RES (30)...(30): Xaa = Asp, Gly or Ser
  MOD_RES (31)...(31): Xaa = Ala, Asp, Glu, Phe, His, Ile, Lys, Leu, Asn, Pro, Gln, Arg, Ser, Thr, Val or Tyr
  MOD_RES (32)...(32): Xaa = Ala, Asp, Glu, Phe, His, Ile, Lys, Leu, Met, Asn, Gln, Arg, Ser, Thr or Tyr
CXXXXXXCXXXXCXXXXXXXXCXCXXXXXXXXC

SEQ ID NO: 269 - protein, 34 aa, Artificial Sequence
  EGF domain monomer sequence
  MOD_RES (2)...(2): Xaa = Ala, Asp, Glu, Phe, Gly, Ile, Lys, Leu, Met, Asn, Pro, Gln, Arg, Ser, Thr, Val or Tyr
  MOD_RES (3)...(3): Xaa = Ala, Asp, Glu, Phe, Gly, His, Ile, Lys, Leu, Met, Asn, Pro, Gln, Arg, Ser, Thr, Val or Tyr
  MOD_RES (4)...(4): Xaa = Ala, Asp, Glu, Phe, Gly, His, Ile, Lys, Leu, Met, Asn, Pro, Gln, Arg, Ser, Thr, Val or Trp
  MOD_RES (5)...(5): Xaa = Ala, Asp, Glu, Phe, Gly, His, Ile, Lys, Leu, Met, Asn, Pro, Gln, Arg, Ser, Thr or Val
  MOD_RES (6)...(6): Xaa = Ala, Asp, Glu, Phe, Gly, His, Ile, Lys, Leu, Asn, Pro, Gln, Arg, Ser, Val or Tyr
  MOD_RES (7)...(7): Xaa = Ala, Asp, Glu, Gly, Ile, Lys, Leu, Met, Asn, Pro, Gln, Arg, Ser, Thr, Val or Tyr
  MOD_RES (9)...(9): Xaa = Ala, Asp, Glu, Phe, Gly, His, Ile, Lys, Leu, Met, Asn, Pro, Gln, Arg, Ser, Thr or Val
  MOD_RES (10)...(10): Xaa = Ala, Asp, Glu, Phe, Gly, His, Lys, Leu, Asn, Pro, Gln, Arg, Ser, Thr or Tyr
  MOD_RES (11)...(11): Xaa = Ala, Gly or Thr
  MOD_RES (12)...(12): Xaa = Ala, Asp, Glu, Phe, His, Ile, Lys, Leu, Met, Asn, Gln, Arg, Ser, Thr or Val
  MOD_RES (14)...(14): Xaa = Ala, Asp, Glu, Phe, Gly, His, Ile, Lys, Leu, Met, Asn, Gln, Arg, Ser, Thr, Val, Trp or Tyr
  MOD_RES (15)...(15): Xaa = Ala, Asp, Glu, Lys, Leu, Asn, Pro, Gln, Arg, Ser, Thr or Val
  MOD_RES (16)...(16): Xaa = Ala, Cys, Asp, Glu, Phe, Gly, His, Ile, Lys, Leu, Met, Asn, Pro, Gln, Arg, Ser, Thr, Val or Tyr
  MOD_RES (17)...(17): Xaa = Ala, Asp, Glu, Phe, Gly, His, Ile, Lys, Leu, Met, Asn, Pro, Gln, Arg, Ser, Thr, Val, Trp or Tyr
  MOD_RES (18)...(18): Xaa = Ala, Asp, Glu, Phe, Gly, His, Ile, Lys, Leu, Asn, Pro, Gln, Arg, Ser, Thr, Val or Trp
  MOD_RES (19)...(19): Xaa = Ala, Asp, Glu, Gly, His, Lys, Leu, Met, Asn, Gln, Arg, Ser, Thr, Val, Trp or Tyr
  MOD_RES (20)...(20): Xaa = Ala, Phe, His, Ile, Leu, Pro, Arg, Thr, Val or Tyr
  MOD_RES (21)...(21): Xaa = Ala, Asp, Glu, Phe, His, Ile, Lys, Leu, Met, Asn, Gln, Arg, Ser, Thr, Val, Trp or Tyr
  MOD_RES (23)...(23): Xaa = Ala, Asp, Glu, Phe, Gly, His, Ile, Lys, Leu, Met, Asn, Pro, Gln, Arg, Ser, Thr, Val, Trp or Tyr
  MOD_RES (25)...(25): Xaa = Ala, Asp, Glu, Phe, Gly, His, Ile, Lys, Leu, Asn, Pro, Gln, Arg, Ser, Thr, Val or Tyr
  MOD_RES (26)...(26): Xaa = Ala, Asp, Glu, Phe, His, Ile, Lys, Leu, Met, Asn, Pro, Gln, Arg, Ser, Thr or Val
  MOD_RES (27)...(27): Xaa = Asp, Glu, Gly, Asn, Pro or Ser
  MOD_RES (28)...(28): Xaa = Ala, Asp, Glu, Phe, His, Leu, Met, Gln, Arg, Ser, Thr, Trp or Tyr
  MOD_RES (29)...(29): Xaa = Ala, Asp, Glu, Phe, Gly, His, Ile, Lys, Leu, Met, Asn, Gln, Arg, Ser, Thr, Val or Tyr
  MOD_RES (30)...(30): Xaa = Ala, Phe, Gly, Ile, Lys, Leu, Met, Pro, Gln, Arg, Ser, Thr, Val, Trp or Tyr
  MOD_RES (31)...(31): Xaa = Ala, Asp, Glu, Phe, Gly, His, Lys, Leu, Met, Asn, Pro, Gln, Arg, Ser, Thr, Val or Trp
  MOD_RES (32)...(32): Xaa = Ala, Asp, Glu, Gly, Ile, Lys, Leu, Met, Asn, Pro, Gln, Arg, Ser, Thr, Val or Tyr
  MOD_RES (33)...(33): Xaa = Ala, Asp, Glu, Phe, Gly, His, Ile, Lys, Leu, Met, Asn, Gln, Ser, Thr or Val
CXXXXXXCXXXXCXXXXXXXXCXCXXXXXXXXXC

SEQ ID NO: 270 - protein, 35 aa, Artificial Sequence
  EGF domain monomer sequence
  MOD_RES (2)...(2): Xaa = Ala, Asp, Glu, Phe, Gly, Ile, Lys, Leu, Met, Asn, Pro, Gln, Arg, Ser, Thr, Val or Tyr
  MOD_RES (3)...(3): Xaa = Ala, Asp, Glu, Phe, Gly, His, Ile, Lys, Leu, Met, Asn, Pro, Gln, Arg, Ser, Thr, Val or Tyr
  MOD_RES (4)...(4): Xaa = Ala, Asp, Glu, Phe, Gly, His, Ile, Lys, Leu, Met, Asn, Pro, Gln, Arg, Ser, Thr, Val or Trp
  MOD_RES (5)...(5): Xaa = Ala, Asp, Glu, Phe, Gly, His, Ile, Lys, Leu, Met, Asn, Pro, Gln, Arg, Ser, Thr or Val
  MOD_RES (6)...(6): Xaa = Ala, Asp, Glu, Phe, Gly, His, Ile, Lys, Leu, Asn, Pro, Gln, Arg, Ser, Val or Tyr
  MOD_RES (7)...(7): Xaa = Ala, Asp, Glu, Gly, Ile, Lys, Leu, Met, Asn, Pro, Gln, Arg, Ser, Thr, Val or Tyr
  MOD_RES (9)...(9): Xaa = Ala, Asp, Glu, Phe, Gly, His, Ile, Lys, Leu, Met, Asn, Pro, Gln, Arg, Ser, Thr or Val
  MOD_RES (10)...(10): Xaa = Ala, Asp, Glu, Phe, Gly, His, Lys, Leu, Asn, Pro, Gln, Arg, Ser, Thr or Tyr
  MOD_RES (11)...(11): Xaa = Ala, Gly or Thr
  MOD_RES (12)...(12): Xaa = Ala, Asp, Glu, Phe, His, Ile, Lys, Leu, Met, Asn, Gln, Arg, Ser, Thr or Val
  MOD_RES (14)...(14): Xaa = Ala, Asp, Glu, Phe, Gly, His, Ile, Lys, Leu, Met, Asn, Gln, Arg, Ser, Thr, Val, Trp or Tyr
  MOD_RES (15)...(15): Xaa = Ala, Asp, Glu, Lys, Leu, Asn, Pro, Gln, Arg, Ser, Thr or Val
  MOD_RES (16)...(16): Xaa = Ala, Cys, Asp, Glu, Phe, Gly, His, Ile, Lys, Leu, Met, Asn, Pro, Gln, Arg, Ser, Thr, Val or Tyr
  MOD_RES (17)...(17): Xaa = Ala, Asp, Glu, Phe, Gly, His, Ile, Lys, Leu, Met, Asn, Pro, Gln, Arg, Ser, Thr, Val, Trp or Tyr
  MOD_RES (18)...(18): Xaa = Ala, Asp, Glu, Phe, Gly, His, Ile, Lys, Leu, Asn, Pro, Gln, Arg, Ser, Thr, Val or Trp
  MOD_RES (19)...(19): Xaa = Ala, Asp, Glu, Gly, His, Lys, Leu, Met, Asn, Gln, Arg, Ser, Thr, Val, Trp or Tyr
  MOD_RES (20)...(20): Xaa = Ala, Phe, His, Ile, Leu, Pro, Arg, Thr, Val or Tyr
  MOD_RES (21)...(21): Xaa = Ala, Asp, Glu, Phe, His, Ile, Lys, Leu, Met, Asn, Gln, Arg, Ser, Thr, Val, Trp or Tyr
  MOD_RES (23)...(23): Xaa = Ala, Asp, Glu, Phe, Gly, His, Ile, Lys, Leu, Met, Asn, Pro, Gln, Arg, Ser, Thr, Val, Trp or Tyr
  MOD_RES (25)...(25): Xaa = Ala, Asp, Glu, Phe, Gly, His, Ile, Lys, Leu, Asn, Pro, Gln, Arg, Ser, Thr, Val or Tyr
  MOD_RES (26)...(26): Xaa = Ala, Asp, Glu, Phe, His, Ile, Lys, Leu, Met, Asn, Pro, Gln, Arg, Ser, Thr or Val
  MOD_RES (27)...(27): Xaa = Asp, Glu, Gly, Asn, Pro or Ser
  MOD_RES (28)...(28): Xaa = Ala, Asp, Glu, Phe, His, Leu, Met, Gln, Arg, Ser, Thr, Trp or Tyr
  MOD_RES (29)...(29): Xaa = Ala, Asp, Glu, Phe, Gly, His, Ile, Lys, Leu, Met, Asn, Gln, Arg, Ser, Thr, Val or Tyr
  MOD_RES (30)...(30): Xaa = Ala, Phe, Gly, Ile, Lys, Leu, Met, Pro, Gln, Arg, Ser, Thr, Val, Trp or Tyr
  MOD_RES (31)...(31): Xaa = Ala, Asp, Glu, Phe, Gly, His, Lys, Leu, Met, Asn, Pro, Gln, Arg, Ser, Thr, Val or Trp
  MOD_RES (32)...(32): Xaa = Ala, Asp, Glu, Gly, Ile, Lys, Leu, Met, Asn, Pro, Gln, Arg, Ser, Thr, Val or Tyr
  MOD_RES (33)...(33): Xaa = Ala, Asp, Glu, Phe, Gly, His, Ile, Lys, Leu, Met, Asn, Gln, Ser, Thr or Val
  MOD_RES (34)...(34): Xaa = Glu, Phe, Gly, His, Ile, Lys, Leu, Met, Asn, Pro, Gln, Arg, Ser, Thr or Trp
CXXXXXXCXXXXCXXXXXXXXCXCXXXXXXXXXXC

SEQ ID NO: 271 - protein, 36 aa, Artificial Sequence
  EGF domain monomer sequence
  MOD_RES (2)...(2): Xaa = Ala, Asp, Glu, Phe, Gly, Ile, Lys, Leu, Met, Asn, Pro, Gln, Arg, Ser, Thr, Val or Tyr
  MOD_RES (3)...(3): Xaa = Ala, Asp, Glu, Phe, Gly, His, Ile, Lys, Leu, Met, Asn, Pro, Gln, Arg, Ser, Thr, Val or Tyr
  MOD_RES (4)...(4): Xaa = Ala, Asp, Glu, Phe, Gly, His, Ile, Lys, Leu, Met, Asn, Pro, Gln, Arg, Ser, Thr, Val or Trp
  MOD_RES (5)...(5): Xaa = Ala, Asp, Glu, Phe, Gly, His, Ile, Lys, Leu, Met, Asn, Pro, Gln, Arg, Ser, Thr or Val
  MOD_RES (6)...(6): Xaa = Ala, Asp, Glu, Phe, Gly, His, Ile, Lys, Leu, Asn, Pro, Gln, Arg, Ser, Val or Tyr
  MOD_RES (7)...(7): Xaa = Ala, Asp, Glu, Gly, Ile, Lys, Leu, Met, Asn, Pro, Gln, Arg, Ser, Thr, Val or Tyr
  MOD_RES (9)...(9): Xaa = Ala, Asp, Glu, Phe, Gly, His, Ile, Lys, Leu, Met, Asn, Pro, Gln, Arg, Ser, Thr or Val
  MOD_RES (10)...(10): Xaa = Ala, Asp, Glu, Phe, Gly, His, Lys, Leu, Asn, Pro, Gln, Arg, Ser, Thr or Tyr
  MOD_RES (11)...(11): Xaa = Ala, Gly or Thr
  MOD_RES (12)...(12): Xaa = Ala, Asp, Glu, Phe, His, Ile, Lys, Leu, Met, Asn, Gln, Arg, Ser, Thr or Val
  MOD_RES (14)...(14): Xaa = Ala, Asp, Glu, Phe, Gly, His, Ile, Lys, Leu, Met, Asn, Gln, Arg, Ser, Thr, Val, Trp or Tyr
  MOD_RES (15)...(15): Xaa = Ala, Asp, Glu, Lys, Leu, Asn, Pro, Gln, Arg, Ser, Thr or Val
  MOD_RES (16)...(16): Xaa = Ala, Cys, Asp, Glu, Phe, Gly, His, Ile, Lys, Leu, Met, Asn, Pro, Gln, Arg, Ser, Thr, Val or Tyr
  MOD_RES (17)...(17): Xaa = Ala, Asp, Glu, Phe, Gly, His, Ile, Lys, Leu, Met, Asn, Pro, Gln, Arg, Ser, Thr, Val, Trp or Tyr
  MOD_RES (18)...(18): Xaa = Ala, Asp, Glu, Phe, Gly, His, Ile, Lys, Leu, Asn, Pro, Gln, Arg, Ser, Thr, Val or Trp
  MOD_RES (19)...(19): Xaa = Ala, Asp, Glu, Gly, His, Lys, Leu, Met, Asn, Gln, Arg, Ser, Thr, Val, Trp or Tyr
  MOD_RES (20)...(20): Xaa = Ala, Phe, His, Ile, Leu, Pro, Arg, Thr, Val or Tyr
  MOD_RES (21)...(21): Xaa = Ala, Asp, Glu, Phe, His, Ile, Lys, Leu, Met, Asn, Gln, Arg, Ser, Thr, Val, Trp or Tyr
  MOD_RES (23)...(23): Xaa = Ala, Asp, Glu, Phe, Gly, His, Ile, Lys, Leu, Met, Asn, Pro, Gln, Arg, Ser, Thr, Val, Trp or Tyr
  MOD_RES (25)...(25): Xaa = Ala, Asp, Glu, Phe, Gly, His, Ile, Lys, Leu, Asn, Pro, Gln, Arg, Ser, Thr, Val or Tyr
  MOD_RES (26)...(26): Xaa = Ala, Asp, Glu, Phe, His, Ile, Lys, Leu, Met, Asn, Pro, Gln, Arg, Ser, Thr or Val
  MOD_RES (27)...(27): Xaa = Asp, Glu, Gly, Asn, Pro or Ser
  MOD_RES (28)...(28): Xaa = Ala, Asp, Glu, Phe, His, Leu, Met, Gln, Arg, Ser, Thr, Trp or Tyr
  MOD_RES (29)...(29): Xaa = Ala, Asp, Glu, Phe, Gly, His, Ile, Lys, Leu, Met, Asn, Gln, Arg, Ser, Thr, Val or Tyr
  MOD_RES (30)...(30): Xaa = Ala, Phe, Gly, Ile, Lys, Leu, Met, Pro, Gln, Arg, Ser, Thr, Val, Trp or Tyr
  MOD_RES (31)...(31): Xaa = Ala, Asp, Glu, Phe, Gly, His, Lys, Leu, Met, Asn, Pro, Gln, Arg, Ser, Thr, Val or Trp
  MOD_RES (32)...(32): Xaa = Ala, Asp, Glu, Gly, Ile, Lys, Leu, Met, Asn, Pro, Gln, Arg, Ser, Thr, Val or Tyr
  MOD_RES (33)...(33): Xaa = Ala, Asp, Glu, Phe, Gly, His, Ile, Lys, Leu, Met, Asn, Gln, Ser, Thr or Val
  MOD_RES (34)...(34): Xaa = Glu, Phe, Gly, His, Ile, Lys, Leu, Met, Asn, Pro, Gln, Arg, Ser, Thr or Trp
  MOD_RES (35)...(35): Xaa = Ala, Asp, Glu, Phe, Gly, His, Lys, Leu, Met, Asn, Pro, Gln, Arg, Ser, Thr, Val or Tyr
CXXXXXXCXXXXCXXXXXXXXCXCXXXXXXXXXXXC

SEQ ID NO: 272 - protein, 37 aa, Artificial Sequence
  EGF domain monomer sequence
  MOD_RES (2)...(2): Xaa = Ala, Asp, Glu, Phe, Gly, Ile, Lys, Leu, Met, Asn, Pro, Gln, Arg, Ser, Thr, Val or Tyr
  MOD_RES (3)...(3): Xaa = Ala, Asp, Glu, Phe, Gly, His, Ile, Lys, Leu, Met, Asn, Pro, Gln, Arg, Ser, Thr, Val or Tyr
  MOD_RES (4)...(4): Xaa = Ala, Asp, Glu, Phe, Gly, His, Ile, Lys, Leu, Met, Asn, Pro, Gln, Arg, Ser, Thr, Val or Trp
  MOD_RES (5)...(5): Xaa = Ala, Asp, Glu, Phe, Gly, His, Ile, Lys, Leu, Met, Asn, Pro, Gln, Arg, Ser, Thr or Val
  MOD_RES (6)...(6): Xaa = Ala, Asp, Glu, Phe, Gly, His, Ile, Lys, Leu, Asn, Pro, Gln, Arg, Ser, Val or Tyr
  MOD_RES (7)...(7): Xaa = Ala, Asp, Glu, Gly, Ile, Lys, Leu, Met, Asn, Pro, Gln, Arg, Ser, Thr, Val or Tyr
  MOD_RES (9)...(9): Xaa = Ala, Asp, Glu, Phe, Gly, His, Ile, Lys, Leu, Met, Asn, Pro, Gln, Arg, Ser, Thr or Val
  MOD_RES (10)...(10): Xaa = Ala, Asp, Glu, Phe, Gly, His, Lys, Leu, Asn, Pro, Gln, Arg, Ser, Thr or Tyr
  MOD_RES (11)...(11): Xaa = Ala, Gly or Thr
  MOD_RES (12)...(12): Xaa = Ala, Asp, Glu, Phe, His, Ile, Lys, Leu, Met, Asn, Gln, Arg, Ser, Thr or Val
  MOD_RES (14)...(14): Xaa = Ala, Asp, Glu, Phe, Gly, His, Ile, Lys, Leu, Met, Asn, Gln, Arg, Ser, Thr, Val, Trp or Tyr
  MOD_RES (15)...(15): Xaa = Ala, Asp, Glu, Lys, Leu, Asn, Pro, Gln, Arg, Ser, Thr or Val
  MOD_RES (16)...(16): Xaa = Ala, Cys, Asp, Glu, Phe, Gly, His, Ile, Lys, Leu, Met, Asn, Pro, Gln, Arg, Ser, Thr, Val or Tyr
  MOD_RES (17)...(17): Xaa = Ala, Asp, Glu, Phe, Gly, His, Ile, Lys, Leu, Met, Asn, Pro, Gln, Arg, Ser, Thr, Val, Trp or Tyr
  MOD_RES (18)...(18): Xaa = Ala, Asp, Glu, Phe, Gly, His, Ile, Lys, Leu, Asn, Pro, Gln, Arg, Ser, Thr, Val or Trp
  MOD_RES (19)...(19): Xaa = Ala, Asp, Glu, Gly, His, Lys, Leu, Met, Asn, Gln, Arg, Ser, Thr, Val, Trp or Tyr
  MOD_RES (20)...(20): Xaa = Ala, Phe, His, Ile, Leu, Pro, Arg, Thr, Val or Tyr
  MOD_RES (21)...(21): Xaa = Ala, Asp, Glu, Phe, His, Ile, Lys, Leu, Met, Asn, Gln, Arg, Ser, Thr, Val, Trp or Tyr
  MOD_RES (23)...(23): Xaa = Ala, Asp, Glu, Phe, Gly, His, Ile, Lys, Leu, Met, Asn, Pro, Gln, Arg, Ser, Thr, Val, Trp or Tyr
  MOD_RES (25)...(25): Xaa = Ala, Asp, Glu, Phe, Gly, His, Ile, Lys, Leu, Asn, Pro, Gln, Arg, Ser, Thr, Val or Tyr
  MOD_RES (26)...(26): Xaa = Ala, Asp, Glu, Phe, His, Ile, Lys, Leu, Met, Asn, Pro, Gln, Arg, Ser, Thr or Val
  MOD_RES (27)...(27): Xaa = Asp, Glu, Gly, Asn, Pro or Ser
  MOD_RES (28)...(28): Xaa = Ala, Asp, Glu, Phe, His, Leu, Met, Gln, Arg, Ser, Thr, Trp or Tyr
  MOD_RES (29)...(29): Xaa = Ala, Asp, Glu, Phe, Gly, His, Ile, Lys, Leu, Met, Asn, Gln, Arg, Ser, Thr, Val or Tyr
  MOD_RES (30)...(30): Xaa = Ala, Phe, Gly, Ile, Lys, Leu, Met, Pro, Gln, Arg, Ser, Thr, Val, Trp or Tyr
  MOD_RES (31)...(31): Xaa = Ala, Asp, Glu, Phe, Gly, His, Lys, Leu, Met, Asn, Pro, Gln, Arg, Ser, Thr, Val or Trp
  MOD_RES (32)...(32): Xaa = Ala, Asp, Glu, Gly, Ile, Lys, Leu, Met, Asn, Pro, Gln, Arg, Ser, Thr, Val or Tyr
  MOD_RES (33)...(33): Xaa = Ala, Asp, Glu, Phe, Gly, His, Ile, Lys, Leu, Met, Asn, Gln, Ser, Thr or Val
  MOD_RES (34)...(34): Xaa = Glu, Phe, Gly, His, Ile, Lys, Leu, Met, Asn, Pro, Gln, Arg, Ser, Thr or Trp
  MOD_RES (35)...(35): Xaa = Ala, Asp, Glu, Phe, Gly, His, Lys, Leu, Met, Asn, Pro, Gln, Arg, Ser, Thr, Val or Tyr
  MOD_RES (36)...(36): Xaa = Ala, Asp, Glu, Phe, Gly, His, Ile, Lys, Met, Asn, Gln, Arg, Ser, Thr, Val or Tyr
CXXXXXXCXXXXCXXXXXXXXCXCXXXXXXXXXXXXC

SEQ ID NO: 273 - protein, 33 aa, Artificial Sequence
  EGF domain monomer sequence
  MOD_RES (2)...(2): Xaa = Ala, Asp, Glu, Gly, Ile, Lys, Leu, Gln, Arg, Ser, Thr or Val
  MOD_RES (3)...(3): Xaa = Ala, Asp, Glu, Phe, Gly, His, Ile, Lys, Leu, Met, Asn, Pro, Gln, Arg, Ser, Thr or Val
  MOD_RES (4)...(4): Xaa = Ala, Glu, Phe, Gly, His, Leu, Asn, Pro, Gln, Arg, Ser, Thr, Trp or Tyr
  MOD_RES (5)...(5): Xaa = Ala, Asp, Glu, Phe, Gly, His, Ile, Lys, Leu, Asn, Pro, Arg, Ser or Thr
  MOD_RES (6)...(6): Xaa = Ala, Phe, Gly, Ile, Lys, Leu, Met, Asn, Pro, Gln, Arg, Ser, Thr, Val or Tyr
  MOD_RES (8)...(8): Xaa = Ala, Cys, Asp, Glu, Phe, Gly, His, Lys, Leu, Met, Asn, Pro, Gln, Arg, Ser, Val or Tyr
  MOD_RES (9)...(9): Xaa = Ala, Asp, Glu, Gly, His, Ile, Lys, Leu, Met, Asn, Pro, Gln, Arg, Ser, Thr, Val or Tyr
  MOD_RES (10)...(10): Xaa = Ala, Asp, Glu, Phe, Gly, His, Lys, Leu, Asn, Gln, Arg, Ser, Thr or Tyr
  MOD_RES (11)...(11): Xaa = Ala, Phe, Gly, His, Gln, Ser, Thr or Val
  MOD_RES (12)...(12): Xaa = Ala, Asp, Glu, Phe, His, Ile, Lys, Leu, Met, Asn, Gln, Arg, Ser, Thr or Val
  MOD_RES (14)...(14): Xaa = Ala, Asp, Glu, Phe, Gly, His, Ile, Lys, Leu, Met, Asn, Gln, Arg, Ser, Thr, Val, Trp or Tyr
  MOD_RES (15)...(15): Xaa = Ala, Asp, Glu, Lys, Leu, Asn, Pro, Gln, Arg, Ser, Thr or Val
  MOD_RES (16)...(16): Xaa = Ala, Cys, Asp, Glu, Phe, Gly, His, Ile, Lys, Leu, Met, Asn, Pro, Gln, Arg, Ser, Thr, Val or Tyr
  MOD_RES (17)...(17): Xaa = Ala, Asp, Glu, Phe, Gly, His, Ile, Lys, Leu, Met, Asn, Pro, Gln, Arg, Ser, Thr, Val, Trp or Tyr
  MOD_RES (18)...(18): Xaa = Ala, Asp, Glu, Phe, Gly, His, Ile, Lys, Leu, Asn, Pro, Gln, Arg, Ser, Thr, Val or Trp
  MOD_RES (19)...(19): Xaa = Ala, Asp, Glu, Gly, His, Lys, Leu, Met, Asn, Gln, Arg, Ser, Thr, Val, Trp or Tyr
  MOD_RES (20)...(20): Xaa = Ala, Phe, His, Ile, Leu, Pro, Arg, Thr, Val or Tyr
  MOD_RES (21)...(21): Xaa = Ala, Asp, Glu, Phe, His, Ile, Lys, Leu, Met, Asn, Gln, Arg, Ser, Thr, Val, Trp or Tyr
  MOD_RES (23)...(23): Xaa = Ala, Asp, Glu, Phe, Gly, His, Ile, Lys, Leu, Met, Asn, Pro, Gln, Arg, Ser, Thr, Val, Trp or Tyr
  MOD_RES (25)...(25): Xaa = Ala, Asp, Glu, Phe, His, Lys, Leu, Met, Asn, Pro, Gln, Arg, Ser, Thr, Val, Trp or Tyr
  MOD_RES (26)...(26): Xaa = Ala, Asp, Glu, Phe, Gly, His, Lys, Leu, Asn, Pro, Gln, Arg, Ser, Thr, Val or Tyr
  MOD_RES (27)...(27): Xaa = Ala, Glu, Gly, His, Lys, Leu, Asn, Pro, Arg, Ser, Thr or Tyr
  MOD_RES (28)...(28): Xaa = Phe, His, Ile, Leu, Met, Arg, Thr, Trp or Tyr
  MOD_RES (29)...(29): Xaa = Ala, Asp, Glu, Phe, Gly, His, Ile, Lys, Leu, Met, Asn, Gln, Arg, Ser, Thr, Val or Tyr
  MOD_RES (30)...(30): Xaa = Asp, Gly or Ser
  MOD_RES (31)...(31): Xaa = Ala, Asp, Glu, Phe, His, Ile, Lys, Leu, Asn, Pro, Gln, Arg, Ser, Thr, Val or Tyr
  MOD_RES (32)...(32): Xaa = Ala, Asp, Glu, Phe, His, Ile, Lys, Leu, Met, Asn, Gln, Arg, Ser, Thr or Tyr
CXXXXXCXXXXXCXXXXXXXXCXCXXXXXXXXC

SEQ ID NO: 274 - protein, 34 aa, Artificial Sequence
  EGF domain monomer sequence
  MOD_RES (2)...(2): Xaa = Ala, Asp, Glu, Gly, Ile, Lys, Leu, Gln, Arg, Ser, Thr or Val
  MOD_RES (3)...(3): Xaa = Ala, Asp, Glu, Phe, Gly, His, Ile, Lys, Leu, Met, Asn, Pro, Gln, Arg, Ser, Thr or Val
  MOD_RES (4)...(4): Xaa = Ala, Glu, Phe, Gly, His, Leu, Asn, Pro, Gln, Arg, Ser, Thr, Trp or Tyr
  MOD_RES (5)...(5): Xaa = Ala, Asp, Glu, Phe, Gly, His, Ile, Lys, Leu, Asn, Pro, Arg, Ser or Thr
  MOD_RES (6)...(6): Xaa = Ala, Phe, Gly, Ile, Lys, Leu, Met, Asn, Pro, Gln, Arg, Ser, Thr, Val or Tyr
  MOD_RES (8)...(8): Xaa = Ala, Cys, Asp, Glu, Phe, Gly, His, Lys, Leu, Met, Asn, Pro, Gln, Arg, Ser, Val or Tyr
  MOD_RES (9)...(9): Xaa = Ala, Asp, Glu, Gly, His, Ile, Lys, Leu, Met, Asn, Pro, Gln, Arg, Ser, Thr, Val or Tyr
  MOD_RES (10)...(10): Xaa = Ala, Asp, Glu, Phe, Gly, His, Lys, Leu, Asn, Gln, Arg, Ser, Thr or Tyr
  MOD_RES (11)...(11): Xaa = Ala, Phe, Gly, His, Gln, Ser, Thr or Val
  MOD_RES (12)...(12): Xaa = Ala, Asp, Glu, Phe, His, Ile, Lys, Leu, Met, Asn, Gln, Arg, Ser, Thr or Val
  MOD_RES (14)...(14): Xaa = Ala, Asp, Glu, Phe, Gly, His, Ile, Lys, Leu, Met, Asn, Gln, Arg, Ser, Thr, Val, Trp or Tyr
  MOD_RES (15)...(15): Xaa = Ala, Asp, Glu, Lys, Leu, Asn, Pro, Gln, Arg, Ser, Thr or Val
  MOD_RES (16)...(16): Xaa = Ala, Cys, Asp, Glu, Phe, Gly, His, Ile, Lys, Leu, Met, Asn, Pro, Gln, Arg, Ser, Thr, Val or Tyr
  MOD_RES (17)...(17): Xaa = Ala, Asp, Glu, Phe, Gly, His, Ile, Lys, Leu, Met, Asn, Pro, Gln, Arg, Ser, Thr, Val, Trp or Tyr
  MOD_RES (18)...(18): Xaa = Ala, Asp, Glu, Phe, Gly, His, Ile, Lys, Leu, Asn, Pro, Gln, Arg, Ser, Thr, Val or Trp
  MOD_RES (19)...(19): Xaa = Ala, Asp, Glu, Gly, His, Lys, Leu, Met, Asn, Gln, Arg, Ser, Thr, Val, Trp or Tyr
  MOD_RES (20)...(20): Xaa = Ala, Phe, His, Ile, Leu, Pro, Arg, Thr, Val or Tyr
  MOD_RES (21)...(21): Xaa = Ala, Asp, Glu, Phe, His, Ile, Lys, Leu, Met, Asn, Gln, Arg, Ser, Thr, Val, Trp or Tyr
  MOD_RES (23)...(23): Xaa = Ala, Asp, Glu, Phe, Gly, His, Ile, Lys, Leu, Met, Asn, Pro, Gln, Arg, Ser, Thr, Val, Trp or Tyr
  MOD_RES (25)...(25): Xaa = Ala, Asp, Glu, Phe, Gly, His, Ile, Lys, Leu, Asn, Pro, Gln, Arg, Ser, Thr, Val or Tyr
  MOD_RES (26)...(26): Xaa = Ala, Asp, Glu, Phe, His, Ile, Lys, Leu, Met, Asn, Pro, Gln, Arg, Ser, Thr or Val
  MOD_RES (27)...(27): Xaa = Asp, Glu, Gly, Asn, Pro or Ser
  MOD_RES (28)...(28): Xaa = Ala, Asp, Glu, Phe, His, Leu, Met, Gln, Arg, Ser, Thr, Trp or Tyr
  MOD_RES (29)...(29): Xaa = Ala, Asp, Glu, Phe, Gly, His, Ile, Lys, Leu, Met, Asn, Gln, Arg, Ser, Thr, Val or Tyr
  MOD_RES (30)...(30): Xaa = Ala, Phe, Gly, Ile, Lys, Leu, Met, Pro, Gln, Arg, Ser, Thr, Val, Trp or Tyr
  MOD_RES (31)...(31): Xaa = Ala, Asp, Glu, Phe, Gly, His, Lys, Leu, Met, Asn, Pro, Gln, Arg, Ser, Thr, Val or Trp
  MOD_RES (32)...(32): Xaa = Ala, Asp, Glu, Gly, Ile, Lys, Leu, Met, Asn, Pro, Gln, Arg, Ser, Thr, Val or Tyr
  MOD_RES (33)...(33): Xaa = Ala, Asp, Glu, Phe, Gly, His, Ile, Lys, Leu, Met, Asn, Gln, Ser, Thr or Val
CXXXXXCXXXXXCXXXXXXXXCXCXXXXXXXXXC

SEQ ID NO: 275 - protein, 35 aa, Artificial Sequence
  EGF domain monomer sequence
  MOD_RES (2)...(2): Xaa = Ala, Asp, Glu, Gly, Ile, Lys, Leu, Gln, Arg, Ser, Thr or Val
  MOD_RES (3)...(3): Xaa = Ala, Asp, Glu, Phe, Gly, His, Ile, Lys, Leu, Met, Asn, Pro, Gln, Arg, Ser, Thr or Val
  MOD_RES (4)...(4): Xaa = Ala, Glu, Phe, Gly, His, Leu, Asn, Pro, Gln, Arg, Ser, Thr, Trp or Tyr
  MOD_RES (5)...(5): Xaa = Ala, Asp, Glu, Phe, Gly, His, Ile, Lys, Leu, Asn, Pro, Arg, Ser or Thr
  MOD_RES (6)...(6): Xaa = Ala, Phe, Gly, Ile, Lys, Leu, Met, Asn, Pro, Gln, Arg, Ser, Thr, Val or Tyr
  MOD_RES (8)...(8): Xaa = Ala, Cys, Asp, Glu, Phe, Gly, His, Lys, Leu, Met, Asn, Pro, Gln, Arg, Ser, Val or Tyr
  MOD_RES (9)...(9): Xaa = Ala, Asp, Glu, Gly, His, Ile, Lys, Leu, Met, Asn, Pro, Gln, Arg, Ser, Thr, Val or Tyr
  MOD_RES (10)...(10): Xaa = Ala, Asp, Glu, Phe, Gly, His, Lys, Leu, Asn, Gln, Arg, Ser, Thr or Tyr
  MOD_RES (11)...(11): Xaa = Ala, Phe, Gly, His, Gln, Ser, Thr or Val
  MOD_RES (12)...(12): Xaa = Ala, Asp, Glu, Phe, His, Ile, Lys, Leu, Met, Asn, Gln, Arg, Ser, Thr or Val
  MOD_RES (14)...(14): Xaa = Ala, Asp, Glu, Phe, Gly, His, Ile, Lys, Leu, Met, Asn, Gln, Arg, Ser, Thr, Val, Trp or Tyr
  MOD_RES (15)...(15): Xaa = Ala, Asp, Glu, Lys, Leu, Asn, Pro, Gln, Arg, Ser, Thr or Val
  MOD_RES (16)...(16): Xaa = Ala, Cys, Asp, Glu, Phe, Gly, His, Ile, Lys, Leu, Met, Asn, Pro, Gln, Arg, Ser, Thr, Val or Tyr
  MOD_RES (17)...(17): Xaa = Ala, Asp, Glu, Phe, Gly, His, Ile, Lys, Leu, Met, Asn, Pro, Gln, Arg, Ser, Thr, Val, Trp or Tyr
  MOD_RES (18)...(18): Xaa = Ala, Asp, Glu, Phe, Gly, His, Ile, Lys, Leu, Asn, Pro, Gln, Arg, Ser, Thr, Val or Trp
  MOD_RES (19)...(19): Xaa = Ala, Asp, Glu, Gly, His, Lys, Leu, Met, Asn, Gln, Arg, Ser, Thr, Val, Trp or Tyr
  MOD_RES (20)...(20): Xaa = Ala, Phe, His, Ile, Leu, Pro, Arg, Thr, Val or Tyr
  MOD_RES (21)...(21): Xaa = Ala, Asp, Glu, Phe, His, Ile, Lys, Leu, Met, Asn, Gln, Arg, Ser, Thr, Val, Trp or Tyr
  MOD_RES (23)...(23): Xaa = Ala, Asp, Glu, Phe, Gly, His, Ile, Lys, Leu, Met, Asn, Pro, Gln, Arg, Ser, Thr, Val, Trp or Tyr
  MOD_RES (25)...(25): Xaa = Ala, Asp, Glu, Phe, Gly, His, Ile, Lys, Leu, Asn, Pro, Gln, Arg, Ser, Thr, Val or Tyr
  MOD_RES (26)...(26): Xaa = Ala, Asp, Glu, Phe, His, Ile, Lys, Leu, Met, Asn, Pro, Gln, Arg, Ser, Thr or Val
  MOD_RES (27)...(27): Xaa = Asp, Glu, Gly, Asn, Pro or Ser
  MOD_RES (28)...(28): Xaa = Ala, Asp, Glu, Phe, His, Leu, Met, Gln, Arg, Ser, Thr, Trp or Tyr
  MOD_RES (29)...(29): Xaa = Ala, Asp, Glu, Phe, Gly, His, Ile, Lys, Leu, Met, Asn, Gln, Arg, Ser, Thr, Val or Tyr
  MOD_RES (30)...(30): Xaa = Ala, Phe, Gly, Ile, Lys, Leu, Met, Pro, Gln, Arg, Ser, Thr, Val, Trp or Tyr
  MOD_RES (31)...(31): Xaa = Ala, Asp, Glu, Phe, Gly, His, Lys, Leu, Met, Asn, Pro, Gln, Arg, Ser, Thr, Val or Trp
  MOD_RES (32)...(32): Xaa = Ala, Asp, Glu, Gly, Ile, Lys, Leu, Met, Asn, Pro, Gln, Arg, Ser, Thr, Val or Tyr
  MOD_RES (33)...(33): Xaa = Ala, Asp, Glu, Phe, Gly, His, Ile, Lys, Leu, Met, Asn, Gln, Ser, Thr or Val
  MOD_RES (34)...(34): Xaa = Glu, Phe, Gly, His, Ile, Lys, Leu, Met, Asn, Pro, Gln, Arg, Ser, Thr or Trp
CXXXXXCXXXXXCXXXXXXXXCXCXXXXXXXXXXC

SEQ ID NO: 276 - protein, 36 aa, Artificial Sequence
  EGF domain monomer sequence
  MOD_RES (2)...(2): Xaa = Ala, Asp, Glu, Gly, Ile, Lys, Leu, Gln, Arg, Ser, Thr or Val
  MOD_RES (3)...(3): Xaa = Ala, Asp, Glu, Phe, Gly, His, Ile, Lys, Leu, Met, Asn, Pro, Gln, Arg, Ser, Thr or Val
  MOD_RES (4)...(4): Xaa = Ala, Glu, Phe, Gly, His, Leu, Asn, Pro, Gln, Arg, Ser, Thr, Trp or Tyr
  MOD_RES (5)...(5): Xaa = Ala, Asp, Glu, Phe, Gly, His, Ile, Lys, Leu, Asn, Pro, Arg, Ser or Thr
  MOD_RES (6)...(6): Xaa = Ala, Phe, Gly, Ile, Lys, Leu, Met, Asn, Pro, Gln, Arg, Ser, Thr, Val or Tyr
  MOD_RES (8)...(8): Xaa = Ala, Cys, Asp, Glu, Phe, Gly, His, Lys, Leu, Met, Asn, Pro, Gln, Arg, Ser, Val or Tyr
  MOD_RES (9)...(9): Xaa = Ala, Asp, Glu, Gly, His, Ile, Lys, Leu, Met, Asn, Pro, Gln, Arg, Ser, Thr, Val or Tyr
  MOD_RES (10)...(10): Xaa = Ala, Asp, Glu, Phe, Gly, His, Lys, Leu, Asn, Gln, Arg, Ser, Thr or Tyr
  MOD_RES (11)...(11): Xaa = Ala, Phe, Gly, His, Gln, Ser, Thr or Val
  MOD_RES (12)...(12): Xaa = Ala, Asp, Glu, Phe, His, Ile, Lys, Leu, Met, Asn, Gln, Arg, Ser, Thr or Val
  MOD_RES (14)...(14): Xaa = Ala, Asp, Glu, Phe, Gly, His, Ile, Lys, Leu, Met, Asn, Gln, Arg, Ser, Thr, Val, Trp or Tyr
  MOD_RES (15)...(15): Xaa = Ala, Asp, Glu, Lys, Leu, Asn, Pro, Gln, Arg, Ser, Thr or Val
  MOD_RES (16)...(16): Xaa = Ala, Cys, Asp, Glu, Phe, Gly, His, Ile, Lys, Leu, Met, Asn, Pro, Gln, Arg, Ser, Thr, Val or Tyr
  MOD_RES (17)...(17): Xaa = Ala, Asp, Glu, Phe, Gly, His, Ile, Lys, Leu, Met, Asn, Pro, Gln, Arg, Ser, Thr, Val, Trp or Tyr
  MOD_RES (18)...(18): Xaa = Ala, Asp, Glu, Phe, Gly, His, Ile, Lys, Leu, Asn, Pro, Gln, Arg, Ser, Thr, Val or Trp
  MOD_RES (19)...(19): Xaa = Ala, Asp, Glu, Gly, His, Lys, Leu, Met, Asn, Gln, Arg, Ser, Thr, Val, Trp or Tyr
  MOD_RES (20)...(20): Xaa = Ala, Phe, His, Ile, Leu, Pro, Arg, Thr, Val or Tyr
  MOD_RES (21)...(21): Xaa = Ala, Asp, Glu, Phe, His, Ile, Lys, Leu, Met, Asn, Gln, Arg, Ser, Thr, Val, Trp or Tyr
  MOD_RES (23)...(23): Xaa = Ala, Asp, Glu, Phe, Gly, His, Ile, Lys, Leu, Met, Asn, Pro, Gln, Arg, Ser, Thr, Val, Trp or Tyr
  MOD_RES (25)...(25): Xaa = Ala, Asp, Glu, Phe, Gly, His, Ile, Lys, Leu, Asn, Pro, Gln, Arg, Ser, Thr, Val or Tyr
  MOD_RES (26)...(26): Xaa = Ala, Asp, Glu, Phe, His, Ile, Lys, Leu, Met, Asn, Pro, Gln, Arg, Ser, Thr or Val
  MOD_RES (27)...(27): Xaa = Asp, Glu, Gly, Asn, Pro or Ser
  MOD_RES (28)...(28): Xaa = Ala, Asp, Glu, Phe, His, Leu, Met, Gln, Arg, Ser, Thr, Trp or Tyr
  MOD_RES (29)...(29): Xaa = Ala, Asp, Glu, Phe, Gly, His, Ile, Lys, Leu, Met, Asn, Gln, Arg, Ser, Thr, Val or Tyr
  MOD_RES (30)...(30): Xaa = Ala, Phe, Gly, Ile, Lys, Leu, Met, Pro, Gln, Arg, Ser, Thr, Val, Trp or Tyr
  MOD_RES (31)...(31): Xaa = Ala, Asp, Glu, Phe, Gly, His, Lys, Leu, Met, Asn, Pro, Gln, Arg, Ser, Thr, Val or Trp
  MOD_RES (32)...(32): Xaa = Ala, Asp, Glu, Gly, Ile, Lys, Leu, Met, Asn, Pro, Gln, Arg, Ser, Thr, Val or Tyr
  MOD_RES (33)...(33): Xaa = Ala, Asp, Glu, Phe, Gly, His, Ile, Lys, Leu, Met, Asn, Gln, Ser, Thr or Val
  MOD_RES (34)...(34): Xaa = Glu, Phe, Gly, His, Ile, Lys, Leu, Met, Asn, Pro, Gln, Arg, Ser, Thr or Trp
  MOD_RES (35)...(35): Xaa = Ala, Asp, Glu, Phe, Gly, His, Lys, Leu, Met, Asn, Pro, Gln, Arg, Ser, Thr, Val or Tyr
CXXXXXCXXXXXCXXXXXXXXCXCXXXXXXXXXXXC

SEQ ID NO: 277 - protein, 37 aa, Artificial Sequence
  EGF domain monomer sequence
  MOD_RES (2)...(2): Xaa = Ala, Asp, Glu, Gly, Ile, Lys, Leu, Gln, Arg, Ser, Thr or Val
  MOD_RES (3)...(3): Xaa = Ala, Asp, Glu, Phe, Gly, His, Ile, Lys, Leu, Met, Asn, Pro, Gln, Arg, Ser, Thr or Val
  MOD_RES (4)...(4): Xaa = Ala, Glu, Phe, Gly, His, Leu, Asn, Pro, Gln, Arg, Ser, Thr, Trp or Tyr
  MOD_RES (5)...(5): Xaa = Ala, Asp, Glu, Phe, Gly, His, Ile, Lys, Leu, Asn, Pro, Arg, Ser or Thr
  MOD_RES (6)...(6): Xaa = Ala, Phe, Gly, Ile, Lys, Leu, Met, Asn, Pro, Gln, Arg, Ser, Thr, Val or Tyr
  MOD_RES (8)...(8): Xaa = Ala, Cys, Asp, Glu, Phe, Gly, His, Lys, Leu, Met, Asn, Pro, Gln, Arg, Ser, Val or Tyr
  MOD_RES (9)...(9): Xaa = Ala, Asp, Glu, Gly, His, Ile, Lys, Leu, Met, Asn, Pro, Gln, Arg, Ser, Thr, Val or Tyr
  MOD_RES (10)...(10): Xaa = Ala, Asp, Glu, Phe, Gly, His, Lys, Leu, Asn, Gln, Arg, Ser, Thr or Tyr
  MOD_RES (11)...(11): Xaa = Ala, Phe, Gly, His, Gln, Ser, Thr or Val
  MOD_RES (12)...(12): Xaa = Ala, Asp, Glu, Phe, His, Ile, Lys, Leu, Met, Asn, Gln, Arg, Ser, Thr or Val
  MOD_RES (14)...(14): Xaa = Ala, Asp, Glu, Phe, Gly, His, Ile, Lys, Leu, Met, Asn, Gln, Arg, Ser, Thr, Val, Trp or Tyr
  MOD_RES (15)...(15): Xaa = Ala, Asp, Glu, Lys, Leu, Asn, Pro, Gln, Arg, Ser, Thr or Val
  MOD_RES (16)...(16): Xaa = Ala, Cys, Asp, Glu, Phe, Gly, His, Ile, Lys, Leu, Met, Asn, Pro, Gln, Arg, Ser, Thr, Val or Tyr
  MOD_RES (17)...(17): Xaa = Ala, Asp, Glu, Phe, Gly, His, Ile, Lys, Leu, Met, Asn, Pro, Gln, Arg, Ser, Thr, Val, Trp or Tyr
  MOD_RES (18)...(18): Xaa = Ala, Asp, Glu, Phe, Gly, His, Ile, Lys, Leu, Asn, Pro, Gln, Arg, Ser, Thr, Val or Trp
  MOD_RES (19)...(19): Xaa = Ala, Asp, Glu, Gly, His, Lys, Leu, Met, Asn, Gln, Arg, Ser, Thr, Val, Trp or Tyr
  MOD_RES (20)...(20): Xaa = Ala, Phe, His, Ile, Leu, Pro, Arg, Thr, Val or Tyr
  MOD_RES (21)...(21): Xaa = Ala, Asp, Glu, Phe, His, Ile, Lys, Leu, Met, Asn, Gln, Arg, Ser, Thr, Val, Trp or Tyr
  MOD_RES (23)...(23): Xaa = Ala, Asp, Glu, Phe, Gly, His, Ile, Lys, Leu, Met, Asn, Pro, Gln, Arg, Ser, Thr, Val, Trp or Tyr
  MOD_RES (25)...(25): Xaa = Ala, Asp, Glu, Phe, Gly, His, Ile, Lys, Leu, Asn, Pro, Gln, Arg, Ser, Thr, Val or Tyr
  MOD_RES (26)...(26): Xaa = Ala, Asp, Glu, Phe, His, Ile, Lys, Leu, Met, Asn, Pro, Gln, Arg, Ser, Thr or Val
  MOD_RES (27)...(27): Xaa = Asp, Glu, Gly, Asn, Pro or Ser
  MOD_RES (28)...(28): Xaa = Ala, Asp, Glu, Phe, His, Leu, Met, Gln, Arg, Ser, Thr, Trp or Tyr
  MOD_RES (29)...(29): Xaa = Ala, Asp, Glu, Phe, Gly, His, Ile, Lys, Leu, Met, Asn, Gln, Arg, Ser, Thr, Val or Tyr
  MOD_RES (30)...(30): Xaa = Ala, Phe, Gly, Ile, Lys, Leu, Met, Pro, Gln, Arg, Ser, Thr, Val, Trp or Tyr
  MOD_RES (31)...(31): Xaa = Ala, Asp, Glu, Phe, Gly, His, Lys, Leu, Met, Asn, Pro, Gln, Arg, Ser, Thr, Val or Trp
  MOD_RES (32)...(32): Xaa = Ala, Asp, Glu, Gly, Ile, Lys, Leu, Met, Asn, Pro, Gln, Arg, Ser, Thr, Val or Tyr
  MOD_RES (33)...(33): Xaa = Ala, Asp, Glu, Phe, Gly, His, Ile, Lys, Leu, Met, Asn, Gln, Ser, Thr or Val
  MOD_RES (34)...(34): Xaa = Glu, Phe, Gly, His, Ile, Lys, Leu, Met, Asn, Pro, Gln, Arg, Ser, Thr or Trp
  MOD_RES (35)...(35): Xaa = Ala, Asp, Glu, Phe, Gly, His, Lys, Leu, Met, Asn, Pro, Gln, Arg, Ser, Thr, Val or Tyr
  MOD_RES (36)...(36): Xaa = Ala, Asp, Glu, Phe, Gly, His, Ile, Lys, Met, Asn, Gln, Arg, Ser, Thr, Val or Tyr
CXXXXXCXXXXXCXXXXXXXXCXCXXXXXXXXXXXXC

SEQ ID NO: 278 - protein, 34 aa, Artificial Sequence
  EGF domain monomer sequence
  MOD_RES (2)...(2): Xaa = Ala, Asp, Glu, Phe, Gly, Ile, Lys, Leu, Met, Asn, Pro, Gln, Arg, Ser, Thr, Val or Tyr
  MOD_RES (3)...(3): Xaa = Ala, Asp, Glu, Phe, Gly, His, Ile, Lys, Leu, Met, Asn, Pro, Gln, Arg, Ser, Thr, Val or Tyr
  MOD_RES (4)...(4): Xaa = Ala, Asp, Glu, Phe, Gly, His, Ile, Lys, Leu, Met, Asn, Pro, Gln, Arg, Ser, Thr, Val or Trp
  MOD_RES (5)...(5): Xaa = Ala, Asp, Glu, Phe, Gly, His, Ile, Lys, Leu, Met, Asn, Pro, Gln, Arg, Ser, Thr or Val
  MOD_RES (6)...(6): Xaa = Ala, Asp, Glu, Phe, Gly, His, Ile, Lys, Leu, Asn, Pro, Gln, Arg, Ser, Val or Tyr
  MOD_RES (7)...(7): Xaa = Ala, Asp, Glu, Gly, Ile, Lys, Leu, Met, Asn, Pro, Gln, Arg, Ser, Thr, Val or Tyr
  MOD_RES (9)...(9): Xaa = Ala, Cys, Asp, Glu, Phe, Gly, His, Lys, Leu, Met, Asn, Pro, Gln, Arg, Ser, Val or Tyr
  MOD_RES (10)...(10): Xaa = Ala, Asp, Glu, Gly, His, Ile, Lys, Leu, Met, Asn, Pro, Gln, Arg, Ser, Thr, Val or Tyr
  MOD_RES (11)...(11): Xaa = Ala, Asp, Glu, Phe, Gly, His, Lys, Leu, Asn, Gln, Arg, Ser, Thr or Tyr
  MOD_RES (12)...(12): Xaa = Ala, Phe, Gly, His, Gln, Ser, Thr or Val
  MOD_RES (13)...(13): Xaa = Ala, Asp, Glu, Phe, His, Ile, Lys, Leu, Met, Asn, Gln, Arg, Ser, Thr or Val
  MOD_RES (15)...(15): Xaa = Ala, Asp, Glu, Phe, Gly, His, Ile, Lys, Leu, Met, Asn, Gln, Arg, Ser, Thr, Val, Trp or Tyr
  MOD_RES (16)...(16): Xaa = Ala, Asp, Glu, Lys, Leu, Asn, Pro, Gln, Arg, Ser, Thr or Val
  MOD_RES (17)...(17): Xaa = Ala, Cys, Asp, Glu, Phe, Gly, His, Ile, Lys, Leu, Met, Asn, Pro, Gln, Arg, Ser, Thr, Val or Tyr
  MOD_RES (18)...(18): Xaa = Ala, Asp, Glu, Phe, Gly, His, Ile, Lys, Leu, Met, Asn, Pro, Gln, Arg, Ser, Thr, Val, Trp or Tyr
  MOD_RES (19)...(19): Xaa = Ala, Asp, Glu, Phe, Gly, His, Ile, Lys, Leu, Asn, Pro, Gln, Arg, Ser, Thr, Val or Trp
  MOD_RES (20)...(20): Xaa = Ala, Asp, Glu, Gly, His, Lys, Leu, Met, Asn, Gln, Arg, Ser, Thr, Val, Trp or Tyr
  MOD_RES (21)...(21): Xaa = Ala, Phe, His, Ile, Leu, Pro, Arg, Thr, Val or Tyr
  MOD_RES (22)...(22): Xaa = Ala, Asp, Glu, Phe, His, Ile, Lys, Leu, Met, Asn, Gln, Arg, Ser, Thr, Val, Trp or Tyr
  MOD_RES (24)...(24): Xaa = Ala, Asp, Glu, Phe, Gly, His, Ile, Lys, Leu, Met, Asn, Pro, Gln, Arg, Ser, Thr, Val, Trp or Tyr
  MOD_RES (26)...(26): Xaa = Ala, Asp, Glu, Phe, His, Lys, Leu, Met, Asn, Pro, Gln, Arg, Ser, Thr, Val, Trp or Tyr
  MOD_RES (27)...(27): Xaa = Ala, Asp, Glu, Phe, Gly, His, Lys, Leu, Asn, Pro, Gln, Arg, Ser, Thr, Val or Tyr
  MOD_RES (28)...(28): Xaa = Ala, Glu, Gly, His, Lys, Leu, Asn, Pro, Arg, Ser, Thr or Tyr
  MOD_RES (29)...(29): Xaa = Phe, His, Ile, Leu, Met, Arg, Thr, Trp or Tyr
  MOD_RES (30)...(30): Xaa = Ala, Asp, Glu, Phe, Gly, His, Ile, Lys, Leu, Met, Asn, Gln, Arg, Ser, Thr, Val or Tyr
  MOD_RES (31)...(31): Xaa = Asp, Gly or Ser
  MOD_RES (32)...(32): Xaa = Ala, Asp, Glu, Phe, His, Ile, Lys, Leu, Asn, Pro, Gln, Arg, Ser, Thr, Val or Tyr
  MOD_RES (33)...(33): Xaa = Ala, Asp, Glu, Phe, His, Ile, Lys, Leu, Met, Asn, Gln, Arg, Ser, Thr or Tyr
CXXXXXXCXXXXXCXXXXXXXXCXCXXXXXXXXC

SEQ ID NO: 279 - protein, 35 aa, Artificial Sequence
  EGF domain monomer sequence
  MOD_RES (2)...(2): Xaa = Ala, Asp, Glu, Phe, Gly, Ile, Lys, Leu, Met, Asn, Pro, Gln, Arg, Ser, Thr, Val or Tyr
  MOD_RES (3)...(3): Xaa = Ala, Asp, Glu, Phe, Gly, His, Ile, Lys, Leu, Met, Asn, Pro, Gln, Arg, Ser, Thr, Val or Tyr
  MOD_RES (4)...(4): Xaa = Ala, Asp, Glu, Phe, Gly, His, Ile, Lys, Leu, Met, Asn, Pro, Gln, Arg, Ser, Thr, Val or Trp
  MOD_RES (5)...(5): Xaa = Ala, Asp, Glu, Phe, Gly, His, Ile, Lys, Leu, Met, Asn, Pro, Gln, Arg, Ser, Thr or Val
  MOD_RES (6)...(6): Xaa = Ala, Asp, Glu, Phe, Gly, His, Ile, Lys, Leu, Asn, Pro, Gln, Arg, Ser, Val or Tyr
  MOD_RES (7)...(7): Xaa = Ala, Asp, Glu, Gly, Ile, Lys, Leu, Met, Asn, Pro, Gln, Arg, Ser, Thr, Val or Tyr
  MOD_RES (9)...(9): Xaa = Ala, Cys, Asp, Glu, Phe, Gly, His, Lys, Leu, Met, Asn, Pro, Gln, Arg, Ser, Val or Tyr
  MOD_RES (10)...(10): Xaa = Ala, Asp, Glu, Gly, His, Ile, Lys, Leu, Met, Asn, Pro, Gln, Arg, Ser, Thr, Val or Tyr
  MOD_RES (11)...(11): Xaa = Ala, Asp, Glu, Phe, Gly, His, Lys, Leu, Asn, Gln, Arg, Ser, Thr or Tyr
  MOD_RES (12)...(12): Xaa = Ala, Phe, Gly, His, Gln, Ser, Thr or Val
  MOD_RES (13)...(13): Xaa = Ala, Asp, Glu, Phe, His, Ile, Lys, Leu, Met, Asn, Gln, Arg, Ser, Thr or Val
  MOD_RES (15)...(15): Xaa = Ala, Asp, Glu, Phe, Gly, His, Ile, Lys, Leu, Met, Asn, Gln, Arg, Ser, Thr, Val, Trp or Tyr
  MOD_RES (16)...(16): Xaa = Ala, Asp, Glu, Lys, Leu, Asn, Pro, Gln, Arg, Ser, Thr or Val
  MOD_RES (17)...(17): Xaa = Ala, Cys, Asp, Glu, Phe, Gly, His, Ile, Lys, Leu, Met, Asn, Pro, Gln, Arg, Ser, Thr, Val or Tyr
  MOD_RES (18)...(18): Xaa = Ala, Asp, Glu, Phe, Gly, His, Ile, Lys, Leu, Met, Asn, Pro, Gln, Arg, Ser, Thr, Val, Trp or Tyr
  MOD_RES (19)...(19): Xaa = Ala, Asp, Glu, Phe, Gly, His, Ile, Lys, Leu, Asn, Pro, Gln, Arg, Ser, Thr, Val or Trp
  MOD_RES (20)...(20): Xaa = Ala, Asp, Glu, Gly, His, Lys, Leu, Met, Asn, Gln, Arg, Ser, Thr, Val, Trp or Tyr
  MOD_RES (21)...(21): Xaa = Ala, Phe, His, Ile, Leu, Pro, Arg, Thr, Val or Tyr
  MOD_RES (22)...(22): Xaa = Ala, Asp, Glu, Phe, His, Ile, Lys, Leu, Met, Asn, Gln, Arg, Ser, Thr, Val, Trp or Tyr
  MOD_RES (24)...(24): Xaa = Ala, Asp, Glu, Phe, Gly, His, Ile, Lys, Leu, Met, Asn, Pro, Gln, Arg, Ser, Thr, Val, Trp or Tyr
  MOD_RES (26)...(26): Xaa = Ala, Asp, Glu, Phe, Gly, His, Ile, Lys, Leu, Asn, Pro, Gln, Arg, Ser, Thr, Val or Tyr
  MOD_RES (27)...(27): Xaa = Ala, Asp, Glu, Phe, His, Ile, Lys, Leu, Met, Asn, Pro, Gln, Arg, Ser, Thr or Val
  MOD_RES (28)...(28): Xaa = Asp, Glu, Gly, Asn, Pro or Ser
  MOD_RES (29)...(29): Xaa = Ala, Asp, Glu, Phe, His, Leu, Met, Gln, Arg, Ser, Thr, Trp or Tyr
  MOD_RES (30)...(30): Xaa = Ala, Asp, Glu, Phe, Gly, His, Ile, Lys, Leu, Met, Asn, Gln, Arg, Ser, Thr, Val or Tyr
  MOD_RES (31)...(31): Xaa = Ala, Phe, Gly, Ile, Lys, Leu, Met, Pro, Gln, Arg, Ser, Thr, Val, Trp or Tyr
  MOD_RES (32)...(32): Xaa = Ala, Asp, Glu, Phe, Gly, His, Lys, Leu, Met, Asn, Pro, Gln, Arg, Ser, Thr, Val or Trp
  MOD_RES (33)...(33): Xaa = Ala, Asp, Glu, Gly, Ile, Lys, Leu, Met, Asn, Pro, Gln, Arg, Ser, Thr, Val or Tyr
  MOD_RES (34)...(34): Xaa = Ala, Asp, Glu, Phe, Gly, His, Ile, Lys, Leu, Met, Asn, Gln, Ser, Thr or Val
CXXXXXXCXXXXXCXXXXXXXXCXCXXXXXXXXXC

SEQ ID NO: 280 - protein, 36 aa, Artificial Sequence
  EGF domain monomer sequence
  MOD_RES (2)...(2): Xaa = Ala, Asp, Glu, Phe, Gly, Ile, Lys, Leu, Met, Asn, Pro, Gln, Arg, Ser, Thr, Val or Tyr
  MOD_RES (3)...(3): Xaa = Ala, Asp, Glu, Phe, Gly, His, Ile, Lys, Leu, Met, Asn, Pro, Gln, Arg, Ser, Thr, Val or Tyr
  MOD_RES (4)...(4): Xaa = Ala, Asp, Glu, Phe, Gly, His, Ile, Lys, Leu, Met, Asn, Pro, Gln, Arg, Ser, Thr, Val or Trp
  MOD_RES (5)...(5): Xaa = Ala, Asp, Glu, Phe, Gly, His, Ile, Lys, Leu, Met, Asn, Pro, Gln, Arg, Ser, Thr or Val
  MOD_RES (6)...(6): Xaa = Ala, Asp, Glu, Phe, Gly, His, Ile, Lys, Leu, Asn, Pro, Gln, Arg, Ser, Val or Tyr
  MOD_RES (7)...(7): Xaa = Ala, Asp, Glu, Gly, Ile, Lys, Leu, Met, Asn, Pro, Gln, Arg, Ser, Thr, Val or Tyr
  MOD_RES (9)...(9): Xaa = Ala, Cys, Asp, Glu, Phe, Gly, His, Lys, Leu, Met, Asn, Pro, Gln, Arg, Ser, Val or Tyr
  MOD_RES (10)...(10): Xaa = Ala, Asp, Glu, Gly, His, Ile, Lys, Leu, Met, Asn, Pro, Gln, Arg, Ser, Thr, Val or Tyr
  MOD_RES (11)...(11): Xaa = Ala, Asp, Glu, Phe, Gly, His, Lys, Leu, Asn, Gln, Arg, Ser, Thr or Tyr
  MOD_RES (12)...(12): Xaa = Ala, Phe, Gly, His, Gln, Ser, Thr or Val
  MOD_RES (13)...(13): Xaa = Ala, Asp, Glu, Phe, His, Ile, Lys, Leu, Met, Asn, Gln, Arg, Ser, Thr or Val
  MOD_RES (15)...(15): Xaa = Ala, Asp, Glu, Phe, Gly, His, Ile, Lys, Leu, Met, Asn, Gln, Arg, Ser, Thr, Val, Trp or Tyr
  MOD_RES (16)...(16): Xaa = Ala, Asp, Glu, Lys, Leu, Asn, Pro, Gln, Arg, Ser, Thr or Val
  MOD_RES (17)...(17): Xaa = Ala, Cys, Asp, Glu, Phe, Gly, His, Ile, Lys, Leu, Met, Asn, Pro, Gln, Arg, Ser, Thr, Val or Tyr
  MOD_RES (18)...(18): Xaa = Ala, Asp, Glu, Phe, Gly, His, Ile, Lys, Leu, Met, Asn, Pro, Gln, Arg, Ser, Thr, Val, Trp or Tyr
  MOD_RES (19)...(19): Xaa = Ala, Asp, Glu, Phe, Gly, His, Ile, Lys, Leu, Asn, Pro, Gln, Arg, Ser, Thr, Val or Trp
  MOD_RES (20)...(20): Xaa = Ala, Asp, Glu, Gly, His, Lys, Leu, Met, Asn, Gln, Arg, Ser, Thr, Val, Trp or Tyr
  MOD_RES (21)...(21): Xaa = Ala, Phe, His, Ile, Leu, Pro, Arg, Thr, Val or Tyr
  MOD_RES (22)...(22): Xaa = Ala, Asp, Glu, Phe, His, Ile, Lys, Leu, Met, Asn, Gln, Arg, Ser, Thr, Val, Trp or Tyr
  MOD_RES (24)...(24): Xaa = Ala, Asp, Glu, Phe, Gly, His, Ile, Lys, Leu, Met, Asn, Pro, Gln, Arg, Ser, Thr, Val, Trp or Tyr
  MOD_RES (26)...(26): Xaa = Ala, Asp, Glu, Phe, Gly, His, Ile, Lys, Leu, Asn, Pro, Gln, Arg, Ser, Thr, Val or Tyr
  MOD_RES (27)...(27): Xaa = Ala, Asp, Glu, Phe, His, Ile, Lys, Leu, Met, Asn, Pro, Gln, Arg, Ser, Thr or Val
  MOD_RES (28)...(28): Xaa = Asp, Glu, Gly, Asn, Pro or Ser
  MOD_RES (29)...(29): Xaa = Ala, Asp, Glu, Phe, His, Leu, Met, Gln, Arg, Ser, Thr, Trp or Tyr
  MOD_RES (30)...(30): Xaa = Ala, Asp, Glu, Phe, Gly, His, Ile, Lys, Leu, Met, Asn, Gln, Arg, Ser, Thr, Val or Tyr
  MOD_RES (31)...(31): Xaa = Ala, Phe, Gly, Ile, Lys, Leu, Met, Pro, Gln, Arg, Ser, Thr, Val, Trp or Tyr
  MOD_RES (32)...(32): Xaa = Ala, Asp, Glu, Phe, Gly, His, Lys, Leu, Met, Asn, Pro, Gln, Arg, Ser, Thr, Val or Trp
  MOD_RES (33)...(33): Xaa = Ala, Asp, Glu, Gly, Ile, Lys, Leu, Met, Asn, Pro, Gln, Arg, Ser, Thr, Val or Tyr
  MOD_RES (34)...(34): Xaa = Ala, Asp, Glu, Phe, Gly, His, Ile, Lys, Leu, Met, Asn, Gln, Ser, Thr or Val
  MOD_RES (35)...(35): Xaa = Glu, Phe, Gly, His, Ile, Lys, Leu, Met, Asn, Pro, Gln, Arg, Ser, Thr or Trp
CXXXXXXCXXXXXCXXXXXXXXCXCXXXXXXXXXXC

SEQ ID NO: 281 - protein, 37 aa, Artificial Sequence
  EGF domain monomer sequence
  MOD_RES (2)...(2): Xaa = Ala, Asp, Glu, Phe, Gly, Ile, Lys, Leu, Met, Asn, Pro, Gln, Arg, Ser, Thr, Val or Tyr
  MOD_RES (3)...(3): Xaa = Ala, Asp, Glu, Phe, Gly, His, Ile, Lys, Leu, Met, Asn, Pro, Gln, Arg, Ser, Thr, Val or Tyr
  MOD_RES (4)...(4): Xaa = Ala, Asp, Glu, Phe, Gly, His, Ile, Lys, Leu, Met, Asn, Pro, Gln, Arg, Ser, Thr, Val or Trp
  MOD_RES (5)...(5): Xaa = Ala, Asp, Glu, Phe, Gly, His, Ile, Lys, Leu, Met, Asn, Pro, Gln, Arg, Ser, Thr or Val
  MOD_RES (6)...(6): Xaa = Ala, Asp, Glu, Phe, Gly, His, Ile, Lys, Leu, Asn, Pro, Gln, Arg, Ser, Val or Tyr
  MOD_RES (7)...(7): Xaa = Ala, Asp, Glu, Gly, Ile, Lys, Leu, Met, Asn, Pro, Gln, Arg, Ser, Thr, Val or Tyr
  MOD_RES (9)...(9): Xaa = Ala, Cys, Asp, Glu, Phe, Gly, His, Lys, Leu, Met, Asn, Pro, Gln, Arg, Ser, Val or Tyr
  MOD_RES (10)...(10): Xaa = Ala, Asp, Glu, Gly, His, Ile, Lys, Leu, Met, Asn, Pro, Gln, Arg, Ser, Thr, Val or Tyr
  MOD_RES (11)...(11): Xaa = Ala, Asp, Glu, Phe, Gly, His, Lys, Leu, Asn, Gln, Arg, Ser, Thr or Tyr
  MOD_RES (12)...(12): Xaa = Ala, Phe, Gly, His, Gln, Ser, Thr or Val
  MOD_RES (13)...(13): Xaa = Ala, Asp, Glu, Phe, His, Ile, Lys, Leu, Met, Asn, Gln, Arg, Ser, Thr or Val
  MOD_RES (15)...(15): Xaa = Ala, Asp, Glu, Phe, Gly, His, Ile, Lys, Leu, Met, Asn, Gln, Arg, Ser, Thr, Val, Trp or Tyr
  MOD_RES (16)...(16): Xaa = Ala, Asp, Glu, Lys, Leu, Asn, Pro, Gln, Arg, Ser, Thr or Val
  MOD_RES (17)...(17): Xaa = Ala, Cys, Asp, Glu, Phe, Gly, His, Ile, Lys, Leu, Met, Asn, Pro, Gln, Arg, Ser, Thr, Val or Tyr
  MOD_RES (18)...(18): Xaa = Ala, Asp, Glu, Phe, Gly, His, Ile, Lys, Leu, Met, Asn, Pro, Gln, Arg, Ser, Thr, Val, Trp or Tyr
  MOD_RES (19)...(19): Xaa = Ala, Asp, Glu, Phe, Gly, His, Ile, Lys, Leu, Asn, Pro, Gln, Arg, Ser, Thr, Val or Trp
  MOD_RES (20)...(20): Xaa = Ala, Asp, Glu, Gly, His, Lys, Leu, Met, Asn, Gln, Arg, Ser, Thr, Val, Trp or Tyr
  MOD_RES (21)...(21): Xaa = Ala, Phe, His, Ile, Leu, Pro, Arg, Thr, Val or Tyr
  MOD_RES (22)...(22): Xaa = Ala, Asp, Glu, Phe, His, Ile, Lys, Leu, Met, Asn, Gln, Arg, Ser, Thr, Val, Trp or Tyr
  MOD_RES (24)...(24): Xaa = Ala, Asp, Glu, Phe, Gly, His, Ile, Lys, Leu, Met, Asn, Pro, Gln, Arg, Ser, Thr, Val, Trp or Tyr
  MOD_RES (26)...(26): Xaa = Ala, Asp, Glu, Phe, Gly, His, Ile, Lys, Leu, Asn, Pro, Gln, Arg, Ser, Thr, Val or Tyr
  MOD_RES (27)...(27): Xaa = Ala, Asp, Glu, Phe, His, Ile, Lys, Leu, Met, Asn, Pro, Gln, Arg, Ser, Thr or Val
  MOD_RES (28)...(28): Xaa = Asp, Glu, Gly, Asn, Pro or Ser
  MOD_RES (29)...(29): Xaa = Ala, Asp, Glu, Phe, His, Leu, Met, Gln, Arg, Ser, Thr, Trp or Tyr
  MOD_RES (30)...(30): Xaa = Ala, Asp, Glu, Phe, Gly, His, Ile, Lys, Leu, Met, Asn, Gln, Arg, Ser, Thr, Val or Tyr
  MOD_RES (31)...(31): Xaa = Ala, Phe, Gly, Ile, Lys, Leu, Met, Pro, Gln, Arg, Ser, Thr, Val, Trp or Tyr
  MOD_RES (32)...(32): Xaa = Ala, Asp, Glu, Phe, Gly, His, Lys, Leu, Met, Asn, Pro, Gln, Arg, Ser, Thr, Val or Trp
  MOD_RES (33)...(33): Xaa = Ala, Asp, Glu, Gly, Ile, Lys, Leu, Met, Asn, Pro, Gln, Arg, Ser, Thr, Val or Tyr
  MOD_RES (34)...(34): Xaa = Ala, Asp, Glu, Phe, Gly, His, Ile, Lys, Leu, Met, Asn, Gln, Ser, Thr or Val
  MOD_RES (35)...(35): Xaa = Glu, Phe, Gly, His, Ile, Lys, Leu, Met, Asn, Pro, Gln, Arg, Ser, Thr or Trp
  MOD_RES (36)...(36): Xaa = Ala, Asp, Glu, Phe, Gly, His, Lys, Leu, Met, Asn, Pro, Gln, Arg, Ser, Thr, Val or Tyr
CXXXXXXCXXXXXCXXXXXXXXCXCXXXXXXXXXXXC

SEQ ID NO: 282 - protein, 38 aa, Artificial Sequence
  EGF domain monomer sequence
  MOD_RES (2)...(2): Xaa = Ala, Asp, Glu, Phe, Gly, Ile, Lys, Leu, Met, Asn, Pro, Gln, Arg, Ser, Thr, Val or Tyr
  MOD_RES (3)...(3): Xaa = Ala, Asp, Glu, Phe, Gly, His, Ile, Lys, Leu, Met, Asn, Pro, Gln, Arg, Ser, Thr, Val or Tyr
  MOD_RES (4)...(4): Xaa = Ala, Asp, Glu, Phe, Gly, His, Ile, Lys, Leu, Met, Asn, Pro, Gln, Arg, Ser, Thr, Val or Trp
  MOD_RES (5)...(5): Xaa = Ala, Asp, Glu, Phe, Gly, His, Ile, Lys, Leu, Met, Asn, Pro, Gln, Arg, Ser, Thr or Val
  MOD_RES (6)...(6): Xaa = Ala, Asp, Glu, Phe, Gly, His, Ile, Lys, Leu, Asn, Pro, Gln, Arg, Ser, Val or Tyr
  MOD_RES (7)...(7): Xaa = Ala, Asp, Glu, Gly, Ile, Lys, Leu, Met, Asn, Pro, Gln, Arg, Ser, Thr, Val or Tyr
  MOD_RES (9)...(9): Xaa = Ala, Cys, Asp, Glu, Phe, Gly, His, Lys, Leu, Met, Asn, Pro, Gln, Arg, Ser, Val or Tyr
  MOD_RES (10)...(10): Xaa = Ala, Asp, Glu, Gly, His, Ile, Lys, Leu, Met, Asn, Pro, Gln, Arg, Ser, Thr, Val or Tyr
  MOD_RES (11)...(11): Xaa = Ala, Asp, Glu, Phe, Gly, His, Lys, Leu, Asn, Gln, Arg, Ser, Thr or Tyr
  MOD_RES (12)...(12): Xaa = Ala, Phe, Gly, His, Gln, Ser, Thr or Val
  MOD_RES (13)...(13): Xaa = Ala, Asp, Glu, Phe, His, Ile, Lys, Leu, Met, Asn, Gln, Arg, Ser, Thr or Val
  MOD_RES (15)...(15): Xaa = Ala, Asp, Glu, Phe, Gly, His, Ile, Lys, Leu, Met, Asn, Gln, Arg, Ser, Thr, Val, Trp or Tyr
  MOD_RES (16)...(16): Xaa = Ala, Asp, Glu, Lys, Leu, Asn, Pro, Gln, Arg, Ser, Thr or Val
  MOD_RES (17)...(17): Xaa = Ala, Cys, Asp, Glu, Phe, Gly, His, Ile, Lys, Leu, Met, Asn, Pro, Gln, Arg, Ser, Thr, Val or Tyr
  MOD_RES (18)...(18): Xaa = Ala, Asp, Glu, Phe, Gly, His, Ile, Lys, Leu, Met, Asn, Pro, Gln, Arg, Ser, Thr, Val, Trp or Tyr
  MOD_RES (19)...(19): Xaa = Ala, Asp, Glu, Phe, Gly, His, Ile, Lys, Leu, Asn, Pro, Gln, Arg, Ser, Thr, Val or Trp
  MOD_RES (20)...(20): Xaa = Ala, Asp, Glu, Gly, His, Lys, Leu, Met, Asn, Gln, Arg, Ser, Thr, Val, Trp or Tyr
  MOD_RES (21)...(21): Xaa = Ala, Phe, His, Ile, Leu, Pro, Arg, Thr, Val or Tyr
  MOD_RES (22)...(22): Xaa = Ala, Asp, Glu, Phe, His, Ile, Lys, Leu, Met, Asn, Gln, Arg, Ser, Thr, Val, Trp or Tyr
  MOD_RES (24)...(24): Xaa = Ala, Asp, Glu, Phe, Gly, His, Ile, Lys, Leu, Met, Asn, Pro, Gln, Arg, Ser, Thr, Val, Trp or Tyr
  MOD_RES (26)...(26): Xaa = Ala, Asp, Glu, Phe, Gly, His, Ile, Lys, Leu, Asn, Pro, Gln, Arg, Ser, Thr, Val or Tyr
  MOD_RES (27)...(27): Xaa = Ala, Asp, Glu, Phe, His, Ile, Lys, Leu, Met, Asn, Pro, Gln, Arg, Ser, Thr or Val
  MOD_RES (28)...(28): Xaa = Asp, Glu, Gly, Asn, Pro or Ser
  MOD_RES (29)...(29): Xaa = Ala, Asp, Glu, Phe, His, Leu, Met, Gln, Arg, Ser, Thr, Trp or Tyr
  MOD_RES (30)...(30): Xaa = Ala, Asp, Glu, Phe, Gly, His, Ile, Lys, Leu, Met, Asn, Gln, Arg, Ser, Thr, Val or Tyr
  MOD_RES (31)...(31): Xaa = Ala, Phe, Gly, Ile, Lys, Leu, Met, Pro, Gln, Arg, Ser, Thr, Val, Trp or Tyr
  MOD_RES (32)...(32): Xaa = Ala, Asp, Glu, Phe, Gly, His, Lys, Leu, Met, Asn, Pro, Gln, Arg, Ser, Thr, Val or Trp
  MOD_RES (33)...(33): Xaa = Ala, Asp, Glu, Gly, Ile, Lys, Leu, Met, Asn, Pro, Gln, Arg, Ser, Thr, Val or Tyr
  MOD_RES (34)...(34): Xaa = Ala, Asp, Glu, Phe, Gly, His, Ile, Lys, Leu, Met, Asn, Gln, Ser, Thr or Val
  MOD_RES (35)...(35): Xaa = Glu, Phe, Gly, His, Ile, Lys, Leu, Met, Asn, Pro, Gln, Arg, Ser, Thr or Trp
  MOD_RES (36)...(36): Xaa = Ala, Asp, Glu, Phe, Gly, His, Lys, Leu, Met, Asn, Pro, Gln, Arg, Ser, Thr, Val or Tyr
  MOD_RES (37)...(37): Xaa = Ala, Asp, Glu, Phe, Gly, His, Ile, Lys, Met, Asn, Gln, Arg, Ser, Thr, Val or Tyr
CXXXXXXCXXXXXCXXXXXXXXCXCXXXXXXXXXXXXC

SEQ ID NO: 283 - protein, 32 aa, Artificial Sequence
  EGF domain monomer sequence
  MOD_RES (2)...(2): Xaa = Ala, Asp, Glu, Gly, Ile, Lys, Leu, Gln, Arg, Ser, Thr or Val
  MOD_RES (3)...(3): Xaa = Ala, Asp, Glu, Phe, Gly, His, Ile, Lys, Leu, Met, Asn, Pro, Gln, Arg, Ser, Thr or Val
  MOD_RES (4)...(4): Xaa = Ala, Glu, Phe, Gly, His, Leu, Asn, Pro, Gln, Arg, Ser, Thr, Trp or Tyr
  MOD_RES (5)...(5): Xaa = Ala, Asp, Glu, Phe, Gly, His, Ile, Lys, Leu, Asn, Pro, Arg, Ser or Thr
  MOD_RES (6)...(6): Xaa = Ala, Phe, Gly, Ile, Lys, Leu, Met, Asn, Pro, Gln, Arg, Ser, Thr, Val or Tyr
  MOD_RES (8)...(8): Xaa = Ala, Asp, Glu, Gly, His, Lys, Asn, Pro, Gln, Ser, Thr or Val
  MOD_RES (9)...(9): Xaa = Phe, Gly, His, Leu, Asn, Gln, Ser, Thr or Tyr
  MOD_RES (10)...(10): Xaa = Ala, Asp, Glu, Phe, Gly, His, Ile, Lys, Leu, Asn, Gln, Arg, Ser, Thr, Val or Tyr
  MOD_RES (12)...(12): Xaa = Ala, Asp, Phe, His, Ile, Lys, Leu, Met, Asn, Gln, Arg, Ser, Thr, Val or Tyr
  MOD_RES (13)...(13): Xaa = Ala, Asp, Glu, Phe, His, Leu, Met, Asn, Pro, Gln, Arg, Ser, Val or Tyr
  MOD_RES (14)...(14): Xaa = Ala, Asp, Glu, Phe, Gly, His, Leu, Asn, Arg, Ser, Thr, Val or Tyr
  MOD_RES (15)...(15): Xaa = Ala, Asp, Glu, Gly, Asn, Pro, Gln, Arg, Ser or Thr
  MOD_RES (16)...(16): Xaa = Ala, Asp, Glu, Phe, Gly, Lys, Leu, Asn, Pro, Gln, Arg, Ser or Thr
  MOD_RES (17)...(17): Xaa = Ala, Asp, Glu, Gly, Met, Asn, Arg, Ser, Thr, Val or Tyr
  MOD_RES (18)...(18): Xaa = Ala, Asp, Glu, Gly, Lys, Leu, Met, Gln, Arg, Ser or Thr
  MOD_RES (19)...(19): Xaa = Phe, His, Ile, Pro, Arg, Val, Trp or Tyr
  MOD_RES (20)...(20): Xaa = Ala, Glu, His, Lys, Leu, Gln, Ser, Thr, Val or Tyr
  MOD_RES (22)...(22): Xaa = Ala, Asp, Glu, Phe, Gly, His, Ile, Lys, Leu, Met, Asn, Pro, Gln, Arg, Ser, Thr, Val, Trp or Tyr
  MOD_RES (24)...(24): Xaa = Ala, Asp, Glu, Phe, His, Lys, Leu, Met, Asn, Pro, Gln, Arg, Ser, Thr, Val, Trp or Tyr
  MOD_RES (25)...(25): Xaa = Ala, Asp, Glu, Phe, Gly, His, Lys, Leu, Asn, Pro, Gln, Arg, Ser, Thr, Val or Tyr
  MOD_RES (26)...(26): Xaa = Ala, Glu, Gly, His, Lys, Leu, Asn, Pro, Arg, Ser, Thr or Tyr
  MOD_RES (27)...(27): Xaa = Phe, His, Ile, Leu, Met, Arg, Thr, Trp or Tyr
  MOD_RES (28)...(28): Xaa = Ala, Asp, Glu, Phe, Gly, His, Ile, Lys, Leu, Met, Asn, Gln, Arg, Ser, Thr, Val or Tyr
  MOD_RES (29)...(29): Xaa = Asp, Gly or Ser
  MOD_RES (30)...(30): Xaa = Ala, Asp, Glu, Phe, His, Ile, Lys, Leu, Asn, Pro, Gln, Arg, Ser, Thr, Val or Tyr
  MOD_RES (31)...(31): Xaa = Ala, Asp, Glu, Phe, His, Ile, Lys, Leu, Met, Asn, Gln, Arg, Ser, Thr or Tyr
CXXXXXCXXXCXXXXXXXXXCXCXXXXXXXXC

SEQ ID NO: 284 - protein, 33 aa, Artificial Sequence
  EGF domain monomer sequence
  MOD_RES (2)...(2): Xaa = Ala, Asp, Glu, Gly, Ile, Lys, Leu, Gln, Arg, Ser, Thr or Val
  MOD_RES (3)...(3): Xaa = Ala, Asp, Glu, Phe, Gly, His, Ile, Lys, Leu, Met, Asn, Pro, Gln, Arg, Ser, Thr or Val
  MOD_RES (4)...(4): Xaa = Ala, Glu, Phe, Gly, His, Leu, Asn, Pro, Gln, Arg, Ser, Thr, Trp or Tyr
  MOD_RES (5)...(5): Xaa = Ala, Asp, Glu, Phe, Gly, His, Ile, Lys, Leu, Asn, Pro, Arg, Ser or Thr
  MOD_RES (6)...(6): Xaa = Ala, Phe, Gly, Ile, Lys, Leu, Met, Asn, Pro, Gln, Arg, Ser, Thr, Val or Tyr
  MOD_RES (8)...(8): Xaa = Ala, Asp, Glu, Gly, His, Lys, Asn, Pro, Gln, Ser, Thr or Val
  MOD_RES (9)...(9): Xaa = Phe, Gly, His, Leu, Asn, Gln, Ser, Thr or Tyr
  MOD_RES (10)...(10): Xaa = Ala, Asp, Glu, Phe, Gly, His, Ile, Lys, Leu, Asn, Gln, Arg, Ser, Thr, Val or Tyr
  MOD_RES (12)...(12): Xaa = Ala, Asp, Phe, His, Ile, Lys, Leu, Met, Asn, Gln, Arg, Ser, Thr, Val or Tyr
  MOD_RES (13)...(13): Xaa = Ala, Asp, Glu, Phe, His, Leu, Met, Asn, Pro, Gln, Arg, Ser, Val or Tyr
  MOD_RES (14)...(14): Xaa = Ala, Asp, Glu, Phe, Gly, His, Leu, Asn, Arg, Ser, Thr, Val or Tyr
  MOD_RES (15)...(15): Xaa = Ala, Asp, Glu, Gly, Asn, Pro, Gln, Arg, Ser or Thr
  MOD_RES (16)...(16): Xaa = Ala, Asp, Glu, Phe, Gly, Lys, Leu, Asn, Pro, Gln, Arg, Ser or Thr
  MOD_RES (17)...(17): Xaa = Ala, Asp, Glu, Gly, Met, Asn, Arg, Ser, Thr, Val or Tyr
  MOD_RES (18)...(18): Xaa = Ala, Asp, Glu, Gly, Lys, Leu, Met, Gln, Arg, Ser or Thr
  MOD_RES (19)...(19): Xaa = Phe, His, Ile, Pro, Arg, Val, Trp or Tyr
  MOD_RES (20)...(20): Xaa = Ala, Glu, His, Lys, Leu, Gln, Ser, Thr, Val or Tyr
  MOD_RES (22)...(22): Xaa = Ala, Asp, Glu, Phe, Gly, His, Ile, Lys, Leu, Met, Asn, Pro, Gln, Arg, Ser, Thr, Val, Trp or Tyr
  MOD_RES (24)...(24): Xaa = Ala, Asp, Glu, Phe, Gly, His, Ile, Lys, Leu, Asn, Pro, Gln, Arg, Ser, Thr, Val or Tyr
  MOD_RES (25)...(25): Xaa = Ala, Asp, Glu, Phe, His, Ile, Lys, Leu, Met, Asn, Pro, Gln, Arg, Ser, Thr or Val
  MOD_RES (26)...(26): Xaa = Asp, Glu, Gly, Asn, Pro or Ser
  MOD_RES (27)...(27): Xaa = Ala, Asp, Glu, Phe, His, Leu, Met, Gln, Arg, Ser, Thr, Trp or Tyr
  MOD_RES (28)...(28): Xaa = Ala, Asp, Glu, Phe, Gly, His, Ile, Lys, Leu, Met, Asn, Gln, Arg, Ser, Thr, Val or Tyr
  MOD_RES (29)...(29): Xaa = Ala, Phe, Gly, Ile, Lys, Leu, Met, Pro, Gln, Arg, Ser, Thr, Val, Trp or Tyr
  MOD_RES (30)...(30): Xaa = Ala, Asp, Glu, Phe, Gly, His, Lys, Leu, Met, Asn, Pro, Gln, Arg, Ser, Thr, Val or Trp
  MOD_RES (31)...(31): Xaa = Ala, Asp, Glu, Gly, Ile, Lys, Leu, Met, Asn, Pro, Gln, Arg, Ser, Thr, Val or Tyr
  MOD_RES (32)...(32): Xaa = Ala, Asp, Glu, Phe, Gly, His, Ile, Lys, Leu, Met, Asn, Gln, Ser, Thr or Val
CXXXXXCXXXCXXXXXXXXXCXCXXXXXXXXXC

SEQ ID NO: 285 - protein, 34 aa, Artificial Sequence
  EGF domain monomer sequence
  MOD_RES (2)...(2): Xaa = Ala, Asp, Glu, Gly, Ile, Lys, Leu, Gln, Arg, Ser, Thr or Val
  MOD_RES (3)...(3): Xaa = Ala, Asp, Glu, Phe, Gly, His, Ile, Lys, Leu, Met, Asn, Pro, Gln, Arg, Ser, Thr or Val
  MOD_RES (4)...(4): Xaa = Ala, Glu, Phe, Gly, His, Leu, Asn, Pro, Gln, Arg, Ser, Thr, Trp or Tyr
  MOD_RES (5)...(5): Xaa = Ala, Asp, Glu, Phe, Gly, His, Ile, Lys, Leu, Asn, Pro, Arg, Ser or Thr
  MOD_RES (6)...(6): Xaa = Ala, Phe, Gly, Ile, Lys, Leu, Met, Asn, Pro, Gln, Arg, Ser, Thr, Val or Tyr
  MOD_RES (8)...(8): Xaa = Ala, Asp, Glu, Gly, His, Lys, Asn, Pro, Gln, Ser, Thr or Val
  MOD_RES (9)...(9): Xaa = Phe, Gly, His, Leu, Asn, Gln, Ser, Thr or Tyr
  MOD_RES (10)...(10): Xaa = Ala, Asp, Glu, Phe, Gly, His, Ile, Lys, Leu, Asn, Gln, Arg, Ser, Thr, Val or Tyr
  MOD_RES (12)...(12): Xaa = Ala, Asp, Phe, His, Ile, Lys, Leu, Met, Asn, Gln, Arg, Ser, Thr, Val or Tyr
  MOD_RES (13)...(13): Xaa = Ala, Asp, Glu, Phe, His, Leu, Met, Asn, Pro, Gln, Arg, Ser, Val or Tyr
  MOD_RES (14)...(14): Xaa = Ala, Asp, Glu, Phe, Gly, His, Leu, Asn, Arg, Ser, Thr, Val or Tyr
  MOD_RES (15)...(15): Xaa = Ala, Asp, Glu, Gly, Asn, Pro, Gln, Arg, Ser or Thr
  MOD_RES (16)...(16): Xaa = Ala, Asp, Glu, Phe, Gly, Lys, Leu, Asn, Pro, Gln, Arg, Ser or Thr
  MOD_RES (17)...(17): Xaa = Ala, Asp, Glu, Gly, Met, Asn, Arg, Ser, Thr, Val or Tyr
  MOD_RES (18)...(18): Xaa = Ala, Asp, Glu, Gly, Lys, Leu, Met, Gln, Arg, Ser or Thr
  MOD_RES (19)...(19): Xaa = Phe, His, Ile, Pro, Arg, Val, Trp or Tyr
  MOD_RES (20)...(20): Xaa = Ala, Glu, His, Lys, Leu, Gln, Ser, Thr, Val or Tyr
  MOD_RES (22)...(22): Xaa = Ala, Asp, Glu, Phe, Gly, His, Ile, Lys, Leu, Met, Asn, Pro, Gln, Arg, Ser, Thr, Val, Trp or Tyr
  MOD_RES (24)...(24): Xaa = Ala, Asp, Glu, Phe, Gly, His, Ile, Lys, Leu, Asn, Pro, Gln, Arg, Ser, Thr, Val or Tyr
  MOD_RES (25)...(25): Xaa = Ala, Asp, Glu, Phe, His, Ile, Lys, Leu, Met, Asn, Pro, Gln, Arg, Ser, Thr or Val
  MOD_RES (26)...(26): Xaa = Asp, Glu, Gly, Asn, Pro or Ser
  MOD_RES (27)...(27): Xaa = Ala, Asp, Glu, Phe, His, Leu, Met, Gln, Arg, Ser, Thr, Trp or Tyr
  MOD_RES (28)...(28): Xaa = Ala, Asp, Glu, Phe, Gly, His, Ile, Lys, Leu, Met, Asn, Gln, Arg, Ser, Thr, Val or Tyr
  MOD_RES (29)...(29): Xaa = Ala, Phe, Gly, Ile, Lys, Leu, Met, Pro, Gln, Arg, Ser, Thr, Val, Trp or Tyr
  MOD_RES (30)...(30): Xaa = Ala, Asp, Glu, Phe, Gly, His, Lys, Leu, Met, Asn, Pro, Gln, Arg, Ser, Thr, Val or Trp
  MOD_RES (31)...(31): Xaa = Ala, Asp, Glu, Gly, Ile, Lys, Leu, Met, Asn, Pro, Gln, Arg, Ser, Thr, Val or Tyr
  MOD_RES (32)...(32): Xaa = Ala, Asp, Glu, Phe, Gly, His, Ile, Lys, Leu, Met, Asn, Gln, Ser, Thr or Val
  MOD_RES (33)...(33): Xaa = Glu, Phe, Gly, His, Ile, Lys, Leu, Met, Asn, Pro, Gln, Arg, Ser, Thr or Trp
CXXXXXCXXXCXXXXXXXXXCXCXXXXXXXXXXC

SEQ ID NO: 286 - protein, 35 aa, Artificial Sequence
  EGF domain monomer sequence
  MOD_RES (2)...(2): Xaa = Ala, Asp, Glu, Gly, Ile, Lys, Leu, Gln, Arg, Ser, Thr or Val
  MOD_RES (3)...(3): Xaa = Ala, Asp, Glu, Phe, Gly, His, Ile, Lys, Leu, Met, Asn, Pro, Gln, Arg, Ser, Thr or Val
  MOD_RES (4)...(4): Xaa = Ala, Glu, Phe, Gly, His, Leu, Asn, Pro, Gln, Arg, Ser, Thr, Trp or Tyr
  MOD_RES (5)...(5): Xaa = Ala, Asp, Glu, Phe, Gly, His, Ile, Lys, Leu, Asn, Pro, Arg, Ser or Thr
  MOD_RES (6)...(6): Xaa = Ala, Phe, Gly, Ile, Lys, Leu, Met, Asn, Pro, Gln, Arg, Ser, Thr, Val or Tyr
  MOD_RES (8)...(8): Xaa = Ala, Asp, Glu, Gly, His, Lys, Asn, Pro, Gln, Ser, Thr or Val
  MOD_RES (9)...(9): Xaa = Phe, Gly, His, Leu, Asn, Gln, Ser, Thr or Tyr
  MOD_RES (10)...(10): Xaa = Ala, Asp, Glu, Phe, Gly, His, Ile, Lys, Leu, Asn, Gln, Arg, Ser, Thr, Val or Tyr
  MOD_RES (12)...(12): Xaa = Ala, Asp, Phe, His, Ile, Lys, Leu, Met, Asn, Gln, Arg, Ser, Thr, Val or Tyr
  MOD_RES (13)...(13): Xaa = Ala, Asp, Glu, Phe, His, Leu, Met, Asn, Pro, Gln, Arg, Ser, Val or Tyr
  MOD_RES (14)...(14): Xaa = Ala, Asp, Glu, Phe, Gly, His, Leu, Asn, Arg, Ser, Thr, Val or Tyr
  MOD_RES (15)...(15): Xaa = Ala, Asp, Glu, Gly, Asn, Pro, Gln, Arg, Ser or Thr
  MOD_RES (16)...(16): Xaa = Ala, Asp, Glu, Phe, Gly, Lys, Leu, Asn, Pro, Gln, Arg, Ser or Thr
  MOD_RES (17)...(17): Xaa = Ala, Asp, Glu, Gly, Met, Asn, Arg, Ser, Thr, Val or Tyr
  MOD_RES (18)...(18): Xaa = Ala, Asp, Glu, Gly, Lys, Leu, Met, Gln, Arg, Ser or Thr
  MOD_RES (19)...(19): Xaa = Phe, His, Ile, Pro, Arg, Val, Trp or Tyr
  MOD_RES (20)...(20): Xaa = Ala, Glu, His, Lys, Leu, Gln, Ser, Thr, Val or Tyr
  MOD_RES (22)...(22): Xaa = Ala, Asp, Glu, Phe, Gly, His, Ile, Lys, Leu, Met, Asn, Pro, Gln, Arg, Ser, Thr, Val, Trp or Tyr
  MOD_RES (24)...(24): Xaa = Ala, Asp, Glu, Phe, Gly, His, Ile, Lys, Leu, Asn, Pro, Gln, Arg, Ser, Thr, Val or Tyr
  MOD_RES (25)...(25): Xaa = Ala, Asp, Glu, Phe, His, Ile, Lys, Leu, Met, Asn, Pro, Gln, Arg, Ser, Thr or Val
  MOD_RES (26)...(26): Xaa = Asp, Glu, Gly, Asn, Pro or Ser
  MOD_RES (27)...(27): Xaa = Ala, Asp, Glu, Phe, His, Leu, Met, Gln, Arg, Ser, Thr, Trp or Tyr
  MOD_RES (28)...(28): Xaa = Ala, Asp, Glu, Phe, Gly, His, Ile, Lys, Leu, Met, Asn, Gln, Arg, Ser, Thr, Val or Tyr
  MOD_RES (29)...(29): Xaa = Ala, Phe, Gly, Ile, Lys, Leu, Met, Pro, Gln, Arg, Ser, Thr, Val, Trp or Tyr
  MOD_RES (30)...(30): Xaa = Ala, Asp, Glu, Phe, Gly, His, Lys, Leu, Met, Asn, Pro, Gln, Arg, Ser, Thr, Val or Trp
  MOD_RES (31)...(31): Xaa = Ala, Asp, Glu, Gly, Ile, Lys, Leu, Met, Asn, Pro, Gln, Arg, Ser, Thr, Val or Tyr
  MOD_RES (32)...(32): Xaa = Ala, Asp, Glu, Phe, Gly, His, Ile, Lys, Leu, Met, Asn, Gln, Ser, Thr or Val
  MOD_RES (33)...(33): Xaa = Glu, Phe, Gly, His, Ile, Lys, Leu, Met, Asn, Pro, Gln, Arg, Ser, Thr or Trp
  MOD_RES (34)...(34): Xaa = Ala, Asp, Glu, Phe, Gly, His, Lys, Leu, Met, Asn, Pro, Gln, Arg, Ser, Thr, Val or Tyr
CXXXXXCXXXCXXXXXXXXXCXCXXXXXXXXXXXC

SEQ ID NO: 287 - protein, 36 aa, Artificial Sequence
  EGF domain monomer sequence
  MOD_RES (2)...(2): Xaa = Ala, Asp, Glu, Gly, Ile, Lys, Leu, Gln, Arg, Ser, Thr or Val
  MOD_RES (3)...(3): Xaa = Ala, Asp, Glu, Phe, Gly, His, Ile, Lys, Leu, Met, Asn, Pro, Gln, Arg, Ser, Thr or Val
  MOD_RES (4)...(4): Xaa = Ala, Glu, Phe, Gly, His, Leu, Asn, Pro, Gln, Arg, Ser, Thr, Trp or Tyr
  MOD_RES (5)...(5): Xaa = Ala, Asp, Glu, Phe, Gly, His, Ile, Lys, Leu, Asn, Pro, Arg, Ser or Thr
  MOD_RES (6)...(6): Xaa = Ala, Phe, Gly, Ile, Lys, Leu, Met, Asn, Pro, Gln, Arg, Ser, Thr, Val or Tyr
  MOD_RES (8)...(8): Xaa = Ala, Asp, Glu, Gly, His, Lys, Asn, Pro, Gln, Ser, Thr or Val
  MOD_RES (9)...(9): Xaa = Phe, Gly, His, Leu, Asn, Gln, Ser, Thr or Tyr
  MOD_RES (10)...(10): Xaa = Ala, Asp, Glu, Phe, Gly, His, Ile, Lys, Leu, Asn, Gln, Arg, Ser, Thr, Val or Tyr
  MOD_RES (12)...(12): Xaa = Ala, Asp, Phe, His, Ile, Lys, Leu, Met, Asn, Gln, Arg, Ser, Thr, Val or Tyr
  MOD_RES (13)...(13): Xaa = Ala, Asp, Glu, Phe, His, Leu, Met, Asn, Pro, Gln, Arg, Ser, Val or Tyr
  MOD_RES (14)...(14): Xaa = Ala, Asp, Glu, Phe, Gly, His, Leu, Asn, Arg, Ser, Thr, Val or Tyr
  MOD_RES (15)...(15): Xaa = Ala, Asp, Glu, Gly, Asn, Pro, Gln, Arg, Ser or Thr
  MOD_RES (16)...(16): Xaa = Ala, Asp, Glu, Phe, Gly, Lys, Leu, Asn, Pro, Gln, Arg, Ser or Thr
  MOD_RES (17)...(17): Xaa = Ala, Asp, Glu, Gly, Met, Asn, Arg, Ser, Thr, Val or Tyr
  MOD_RES (18)...(18): Xaa = Ala, Asp, Glu, Gly, Lys, Leu, Met, Gln, Arg, Ser or Thr
  MOD_RES (19)...(19): Xaa = Phe, His, Ile, Pro, Arg, Val, Trp or Tyr
  MOD_RES (20)...(20): Xaa = Ala, Glu, His, Lys, Leu, Gln, Ser, Thr, Val or Tyr
  MOD_RES (22)...(22): Xaa = Ala, Asp, Glu, Phe, Gly, His, Ile, Lys, Leu, Met, Asn, Pro, Gln, Arg, Ser, Thr, Val, Trp or Tyr
  MOD_RES (24)...(24): Xaa = Ala, Asp, Glu, Phe, Gly, His, Ile, Lys, Leu, Asn, Pro, Gln, Arg, Ser, Thr, Val or Tyr
  MOD_RES (25)...(25): Xaa = Ala, Asp, Glu, Phe, His, Ile, Lys, Leu, Met, Asn, Pro, Gln, Arg, Ser, Thr or Val
  MOD_RES (26)...(26): Xaa = Asp, Glu, Gly, Asn, Pro or Ser
  MOD_RES (27)...(27): Xaa = Ala, Asp, Glu, Phe, His, Leu, Met, Gln, Arg, Ser, Thr, Trp or Tyr
  MOD_RES (28)...(28): Xaa = Ala, Asp, Glu, Phe, Gly, His, Ile, Lys, Leu, Met, Asn, Gln, Arg, Ser, Thr, Val or Tyr
  MOD_RES (29)...(29): Xaa = Ala, Phe, Gly, Ile, Lys, Leu, Met, Pro, Gln, Arg, Ser, Thr, Val, Trp or Tyr
  MOD_RES (30)...(30): Xaa = Ala, Asp, Glu, Phe, Gly, His, Lys, Leu, Met, Asn, Pro, Gln, Arg, Ser, Thr, Val or Trp
  MOD_RES (31)...(31): Xaa = Ala, Asp, Glu, Gly, Ile, Lys, Leu, Met, Asn, Pro, Gln, Arg, Ser, Thr, Val or Tyr
  MOD_RES (32)...(32): Xaa = Ala, Asp, Glu, Phe, Gly, His, Ile, Lys, Leu, Met, Asn, Gln, Ser, Thr or Val
  MOD_RES (33)...(33): Xaa = Glu, Phe, Gly, His, Ile, Lys, Leu, Met, Asn, Pro, Gln, Arg, Ser, Thr or Trp
  MOD_RES (34)...(34): Xaa = Ala, Asp, Glu, Phe, Gly, His, Lys, Leu, Met, Asn, Pro, Gln, Arg, Ser, Thr, Val or Tyr
  MOD_RES (35)...(35): Xaa = Ala, Asp, Glu, Phe, Gly, His, Ile, Lys, Met, Asn, Gln, Arg, Ser, Thr, Val or Tyr
CXXXXXCXXXCXXXXXXXXXCXCXXXXXXXXXXXXC

SEQ ID NO: 288 - protein, 33 aa, Artificial Sequence
  EGF domain monomer sequence
  MOD_RES (2)...(2): Xaa = Ala, Asp, Glu, Phe, Gly, Ile, Lys, Leu, Met, Asn, Pro, Gln, Arg, Ser, Thr, Val or Tyr
  MOD_RES (3)...(3): Xaa = Ala, Asp, Glu, Phe, Gly, His, Ile, Lys, Leu, Met, Asn, Pro, Gln, Arg, Ser, Thr, Val or Tyr
  MOD_RES (4)...(4): Xaa = Ala, Asp, Glu, Phe, Gly, His, Ile, Lys, Leu, Met, Asn, Pro, Gln, Arg, Ser, Thr, Val or Trp
  MOD_RES (5)...(5): Xaa = Ala, Asp, Glu, Phe, Gly, His, Ile, Lys, Leu, Met, Asn, Pro, Gln, Arg, Ser, Thr or Val
  MOD_RES (6)...(6): Xaa = Ala, Asp, Glu, Phe, Gly, His, Ile, Lys, Leu, Asn, Pro, Gln, Arg, Ser, Val or Tyr
  MOD_RES (7)...(7): Xaa = Ala, Asp, Glu, Gly, Ile, Lys, Leu, Met, Asn, Pro, Gln, Arg, Ser, Thr, Val or Tyr
  MOD_RES (9)...(9): Xaa = Ala, Asp, Glu, Gly, His, Lys, Asn, Pro, Gln, Ser, Thr or Val
  MOD_RES (10)...(10): Xaa = Phe, Gly, His, Leu, Asn, Gln, Ser, Thr or Tyr
  MOD_RES (11)...(11): Xaa = Ala, Asp, Glu, Phe, Gly, His, Ile, Lys, Leu, Asn, Gln, Arg, Ser, Thr, Val or Tyr
  MOD_RES (13)...(13): Xaa = Ala, Asp, Phe, His, Ile, Lys, Leu, Met, Asn, Gln, Arg, Ser, Thr, Val or Tyr
  MOD_RES (14)...(14): Xaa = Ala, Asp, Glu, Phe, His, Leu, Met, Asn, Pro, Gln, Arg, Ser, Val or Tyr
  MOD_RES (15)...(15): Xaa = Ala, Asp, Glu, Phe, Gly, His, Leu, Asn, Arg, Ser, Thr, Val or Tyr
  MOD_RES (16)...(16): Xaa = Ala, Asp, Glu, Gly, Asn, Pro, Gln, Arg, Ser or Thr
  MOD_RES (17)...(17): Xaa = Ala, Asp, Glu, Phe, Gly, Lys, Leu, Asn, Pro, Gln, Arg, Ser or Thr
  MOD_RES (18)...(18): Xaa = Ala, Asp, Glu, Gly, Met, Asn, Arg, Ser, Thr, Val or Tyr
  MOD_RES (19)...(19): Xaa = Ala, Asp, Glu, Gly, Lys, Leu, Met, Gln, Arg, Ser or Thr
  MOD_RES (20)...(20): Xaa = Phe, His, Ile, Pro, Arg, Val, Trp or Tyr
  MOD_RES (21)...(21): Xaa = Ala, Glu, His, Lys, Leu, Gln, Ser, Thr, Val or Tyr
  MOD_RES (23)...(23): Xaa = Ala, Asp, Glu, Phe, Gly, His, Ile, Lys, Leu, Met, Asn, Pro, Gln, Arg, Ser, Thr, Val, Trp or Tyr
  MOD_RES (25)...(25): Xaa = Ala, Asp, Glu, Phe, His, Lys, Leu, Met, Asn, Pro, Gln, Arg, Ser, Thr, Val, Trp or Tyr
  MOD_RES (26)...(26): Xaa = Ala, Asp, Glu, Phe, Gly, His, Lys, Leu, Asn, Pro, Gln, Arg, Ser, Thr, Val or Tyr
  MOD_RES (27)...(27): Xaa = Ala, Glu, Gly, His, Lys, Leu, Asn, Pro, Arg, Ser, Thr or Tyr
  MOD_RES (28)...(28): Xaa = Phe, His, Ile, Leu, Met, Arg, Thr, Trp or Tyr
  MOD_RES (29)...(29): Xaa = Ala, Asp, Glu, Phe, Gly, His, Ile, Lys, Leu, Met, Asn, Gln, Arg, Ser, Thr, Val or Tyr
  MOD_RES (30)...(30): Xaa = Asp, Gly or Ser
  MOD_RES (31)...(31): Xaa = Ala, Asp, Glu, Phe, His, Ile, Lys, Leu, Asn, Pro, Gln, Arg, Ser, Thr, Val or Tyr
  MOD_RES (32)...(32): Xaa = Ala, Asp, Glu, Phe, His, Ile, Lys, Leu, Met, Asn, Gln, Arg, Ser, Thr or Tyr
CXXXXXXCXXXCXXXXXXXXXCXCXXXXXXXXC

SEQ ID NO: 289 - protein, 34 aa, Artificial Sequence
  EGF domain monomer sequence
  MOD_RES (2)...(2): Xaa = Ala, Asp, Glu, Phe, Gly, Ile, Lys, Leu, Met, Asn, Pro, Gln, Arg, Ser, Thr, Val or Tyr
  MOD_RES (3)...(3): Xaa = Ala, Asp, Glu, Phe, Gly, His, Ile, Lys, Leu, Met, Asn, Pro, Gln, Arg, Ser, Thr, Val or Tyr
  MOD_RES (4)...(4): Xaa = Ala, Asp, Glu, Phe, Gly, His, Ile, Lys, Leu, Met, Asn, Pro, Gln, Arg, Ser, Thr, Val or Trp
  MOD_RES (5)...(5): Xaa = Ala, Asp, Glu, Phe, Gly, His, Ile, Lys, Leu, Met, Asn, Pro, Gln, Arg, Ser, Thr or Val
  MOD_RES (6)...(6): Xaa = Ala, Asp, Glu, Phe, Gly, His, Ile, Lys, Leu, Asn, Pro, Gln, Arg, Ser, Val or Tyr
  MOD_RES (7)...(7): Xaa = Ala, Asp, Glu, Gly, Ile, Lys, Leu, Met, Asn, Pro, Gln, Arg, Ser, Thr, Val or Tyr
  MOD_RES (9)...(9): Xaa = Ala, Asp, Glu, Gly, His, Lys, Asn, Pro, Gln, Ser, Thr or Val
  MOD_RES (10)...(10): Xaa = Phe, Gly, His, Leu, Asn, Gln, Ser, Thr or Tyr
  MOD_RES (11)...(11): Xaa = Ala, Asp, Glu, Phe, Gly, His, Ile, Lys, Leu, Asn, Gln, Arg, Ser, Thr, Val or Tyr
  MOD_RES (13)...(13): Xaa = Ala, Asp, Phe, His, Ile, Lys, Leu, Met, Asn, Gln, Arg, Ser, Thr, Val or Tyr
  MOD_RES (14)...(14): Xaa = Ala, Asp, Glu, Phe, His, Leu, Met, Asn, Pro, Gln, Arg, Ser, Val or Tyr
  MOD_RES (15)...(15): Xaa = Ala, Asp, Glu, Phe, Gly, His, Leu, Asn, Arg, Ser, Thr, Val or Tyr
  MOD_RES (16)...(16): Xaa = Ala, Asp, Glu, Gly, Asn, Pro, Gln, Arg, Ser or Thr
  MOD_RES (17)...(17): Xaa = Ala, Asp, Glu, Phe, Gly, Lys, Leu, Asn, Pro, Gln, Arg, Ser or Thr
  MOD_RES (18)...(18): Xaa = Ala, Asp, Glu, Gly, Met, Asn, Arg, Ser, Thr, Val or Tyr
  MOD_RES (19)...(19): Xaa = Ala, Asp, Glu, Gly, Lys, Leu, Met, Gln, Arg, Ser or Thr
  MOD_RES (20)...(20): Xaa = Phe, His, Ile, Pro, Arg, Val, Trp or Tyr
  MOD_RES (21)...(21): Xaa = Ala, Glu, His, Lys, Leu, Gln, Ser, Thr, Val or Tyr
  MOD_RES (23)...(23): Xaa = Ala, Asp, Glu, Phe, Gly, His, Ile, Lys, Leu, Met, Asn, Pro, Gln, Arg, Ser, Thr, Val, Trp or Tyr
  MOD_RES (25)...(25): Xaa = Ala, Asp, Glu, Phe, Gly, His, Ile, Lys, Leu, Asn, Pro, Gln, Arg, Ser, Thr, Val or Tyr
  MOD_RES (26)...(26): Xaa = Ala, Asp, Glu, Phe, His, Ile, Lys, Leu, Met, Asn, Pro, Gln, Arg, Ser, Thr or Val
  MOD_RES (27)...(27): Xaa = Asp, Glu, Gly, Asn, Pro or Ser
  MOD_RES (28)...(28): Xaa = Ala, Asp, Glu, Phe, His, Leu, Met, Gln, Arg, Ser, Thr, Trp or Tyr
  MOD_RES (29)...(29): Xaa = Ala, Asp, Glu, Phe, Gly, His, Ile, Lys, Leu, Met, Asn, Gln, Arg, Ser, Thr, Val or Tyr
  MOD_RES (30)...(30): Xaa = Ala, Phe, Gly, Ile, Lys, Leu, Met, Pro, Gln, Arg, Ser, Thr, Val, Trp or Tyr
  MOD_RES (31)...(31): Xaa = Ala, Asp, Glu, Phe, Gly, His, Lys, Leu, Met, Asn, Pro, Gln, Arg, Ser, Thr, Val or Trp
  MOD_RES (32)...(32): Xaa = Ala, Asp, Glu, Gly, Ile, Lys, Leu, Met, Asn, Pro, Gln, Arg, Ser, Thr, Val or Tyr
  MOD_RES (33)...(33): Xaa = Ala, Asp, Glu, Phe, Gly, His, Ile, Lys, Leu, Met, Asn, Gln, Ser, Thr or Val
CXXXXXXCXXXCXXXXXXXXXCXCXXXXXXXXXC

SEQ ID NO: 290 - protein, 35 aa, Artificial Sequence
  EGF domain monomer sequence
  MOD_RES (2)...(2): Xaa = Ala, Asp, Glu, Phe, Gly, Ile, Lys, Leu, Met, Asn, Pro, Gln, Arg, Ser, Thr, Val or Tyr
  MOD_RES (3)...(3): Xaa = Ala, Asp, Glu, Phe, Gly, His, Ile, Lys, Leu, Met, Asn, Pro, Gln, Arg, Ser, Thr, Val or Tyr
  MOD_RES (4)...(4): Xaa = Ala, Asp, Glu, Phe, Gly, His, Ile, Lys, Leu, Met, Asn, Pro, Gln, Arg, Ser, Thr, Val or Trp
  MOD_RES (5)...(5): Xaa = Ala, Asp, Glu, Phe, Gly, His, Ile, Lys, Leu, Met, Asn, Pro, Gln, Arg, Ser, Thr or Val
  MOD_RES (6)...(6): Xaa = Ala, Asp, Glu, Phe, Gly, His, Ile, Lys, Leu, Asn, Pro, Gln, Arg, Ser, Val or Tyr
  MOD_RES (7)...(7): Xaa = Ala, Asp, Glu, Gly, Ile, Lys, Leu, Met, Asn, Pro, Gln, Arg, Ser, Thr, Val or Tyr
  MOD_RES (9)...(9): Xaa = Ala, Asp, Glu, Gly, His, Lys, Asn, Pro, Gln, Ser, Thr or Val
  MOD_RES (10)...(10): Xaa = Phe, Gly, His, Leu, Asn, Gln, Ser, Thr or Tyr
  MOD_RES (11)...(11): Xaa = Ala, Asp, Glu, Phe, Gly, His, Ile, Lys, Leu, Asn, Gln, Arg, Ser, Thr, Val or Tyr
  MOD_RES (13)...(13): Xaa = Ala, Asp, Phe, His, Ile, Lys, Leu, Met, Asn, Gln, Arg, Ser, Thr, Val or Tyr
  MOD_RES (14)...(14): Xaa = Ala, Asp, Glu, Phe, His, Leu, Met, Asn, Pro, Gln, Arg, Ser, Val or Tyr
  MOD_RES (15)...(15): Xaa = Ala, Asp, Glu, Phe, Gly, His, Leu, Asn, Arg, Ser, Thr, Val or Tyr
  MOD_RES (16)...(16): Xaa = Ala, Asp, Glu, Gly, Asn, Pro, Gln, Arg, Ser or Thr
  MOD_RES (17)...(17): Xaa = Ala, Asp, Glu, Phe, Gly, Lys, Leu, Asn, Pro, Gln, Arg, Ser or Thr
  MOD_RES (18)...(18): Xaa = Ala, Asp, Glu, Gly, Met, Asn, Arg, Ser, Thr, Val or Tyr
  MOD_RES (19)...(19): Xaa = Ala, Asp, Glu, Gly, Lys, Leu, Met, Gln, Arg, Ser or Thr
  MOD_RES (20)...(20): Xaa = Phe, His, Ile, Pro, Arg, Val, Trp or Tyr
  MOD_RES (21)...(21): Xaa = Ala, Glu, His, Lys, Leu, Gln, Ser, Thr, Val or Tyr
  MOD_RES (23)...(23): Xaa = Ala, Asp, Glu, Phe, Gly, His, Ile, Lys, Leu, Met, Asn, Pro, Gln, Arg, Ser, Thr, Val, Trp or Tyr
  MOD_RES (25)...(25): Xaa = Ala, Asp, Glu, Phe, Gly, His, Ile, Lys, Leu, Asn, Pro, Gln, Arg, Ser, Thr, Val or Tyr
  MOD_RES (26)...(26): Xaa = Ala, Asp, Glu, Phe, His, Ile, Lys, Leu, Met, Asn, Pro, Gln, Arg, Ser, Thr or Val
  MOD_RES (27)...(27): Xaa = Asp, Glu, Gly, Asn, Pro or Ser
  MOD_RES (28)...(28): Xaa = Ala, Asp, Glu, Phe, His, Leu, Met, Gln, Arg, Ser, Thr, Trp or Tyr
  MOD_RES (29)...(29): Xaa = Ala, Asp, Glu, Phe, Gly, His, Ile, Lys, Leu, Met, Asn, Gln, Arg, Ser, Thr, Val or Tyr
  MOD_RES (30)...(30): Xaa = Ala, Phe, Gly, Ile, Lys, Leu, Met, Pro, Gln, Arg, Ser, Thr, Val, Trp or Tyr
  MOD_RES (31)...(31): Xaa = Ala, Asp, Glu, Phe, Gly, His, Lys, Leu, Met, Asn, Pro, Gln, Arg, Ser, Thr, Val or Trp
  MOD_RES (32)...(32): Xaa = Ala, Asp, Glu, Gly, Ile, Lys, Leu, Met, Asn, Pro, Gln, Arg, Ser, Thr, Val or Tyr
  MOD_RES (33)...(33): Xaa = Ala, Asp, Glu, Phe, Gly, His, Ile, Lys, Leu, Met, Asn, Gln, Ser, Thr or Val
  MOD_RES (34)...(34): Xaa = Glu, Phe, Gly, His, Ile, Lys, Leu, Met, Asn, Pro, Gln, Arg, Ser, Thr or Trp
CXXXXXXCXXXCXXXXXXXXXCXCXXXXXXXXXXC

SEQ ID NO: 291 - protein, 36 aa, Artificial Sequence
  EGF domain monomer sequence
  MOD_RES (2)...(2): Xaa = Ala, Asp, Glu, Phe, Gly, Ile, Lys, Leu, Met, Asn, Pro, Gln, Arg, Ser, Thr, Val or Tyr
  MOD_RES (3)...(3): Xaa = Ala, Asp, Glu, Phe, Gly, His, Ile, Lys, Leu, Met, Asn, Pro, Gln, Arg, Ser, Thr, Val or Tyr
  MOD_RES (4)...(4): Xaa = Ala, Asp, Glu, Phe, Gly, His, Ile, Lys, Leu, Met, Asn, Pro, Gln, Arg, Ser, Thr, Val or Trp
  MOD_RES (5)...(5): Xaa = Ala, Asp, Glu, Phe, Gly, His, Ile, Lys, Leu, Met, Asn, Pro, Gln, Arg, Ser, Thr or Val
  MOD_RES (6)...(6): Xaa = Ala, Asp, Glu, Phe, Gly, His, Ile, Lys, Leu, Asn, Pro, Gln, Arg, Ser, Val or Tyr
  MOD_RES (7)...(7): Xaa = Ala, Asp, Glu, Gly, Ile, Lys, Leu, Met, Asn, Pro, Gln, Arg, Ser, Thr, Val or Tyr
  MOD_RES (9)...(9): Xaa = Ala, Asp, Glu, Gly, His, Lys, Asn, Pro, Gln, Ser, Thr or Val
  MOD_RES (10)...(10): Xaa = Phe, Gly, His, Leu, Asn, Gln, Ser, Thr or Tyr
  MOD_RES (11)...(11): Xaa = Ala, Asp, Glu, Phe, Gly, His, Ile, Lys, Leu, Asn, Gln, Arg, Ser, Thr, Val or Tyr
  MOD_RES (13)...(13): Xaa = Ala, Asp, Phe, His, Ile, Lys, Leu, Met, Asn, Gln, Arg, Ser, Thr, Val or Tyr
  MOD_RES (14)...(14): Xaa = Ala, Asp, Glu, Phe, His, Leu, Met, Asn, Pro, Gln, Arg, Ser, Val or Tyr
  MOD_RES (15)...(15): Xaa = Ala, Asp, Glu, Phe, Gly, His, Leu, Asn, Arg, Ser, Thr, Val or Tyr
  MOD_RES (16)...(16): Xaa = Ala, Asp, Glu, Gly, Asn, Pro, Gln, Arg, Ser or Thr
  MOD_RES (17)...(17): Xaa = Ala, Asp, Glu, Phe, Gly, Lys, Leu, Asn, Pro, Gln, Arg, Ser or Thr
  MOD_RES (18)...(18): Xaa = Ala, Asp, Glu, Gly, Met, Asn, Arg, Ser, Thr, Val or Tyr
  MOD_RES (19)...(19): Xaa = Ala, Asp, Glu, Gly, Lys, Leu, Met, Gln, Arg, Ser or Thr
  MOD_RES (20)...(20): Xaa = Phe, His, Ile, Pro, Arg, Val, Trp or Tyr
  MOD_RES (21)...(21): Xaa = Ala, Glu, His, Lys, Leu, Gln, Ser, Thr, Val or Tyr
  MOD_RES (23)...(23): Xaa = Ala, Asp, Glu, Phe, Gly, His, Ile, Lys, Leu, Met, Asn, Pro, Gln, Arg, Ser, Thr, Val, Trp or Tyr
  MOD_RES (25)...(25): Xaa = Ala, Asp, Glu, Phe, Gly, His, Ile, Lys, Leu, Asn, Pro, Gln, Arg, Ser, Thr, Val or Tyr
  MOD_RES (26)...(26): Xaa = Ala, Asp, Glu, Phe, His, Ile, Lys, Leu, Met, Asn, Pro, Gln, Arg, Ser, Thr or Val
  MOD_RES (27)...(27): Xaa = Asp, Glu, Gly, Asn, Pro or Ser
  MOD_RES (28)...(28): Xaa = Ala, Asp, Glu, Phe, His, Leu, Met, Gln, Arg, Ser, Thr, Trp or Tyr
  MOD_RES (29)...(29): Xaa = Ala, Asp, Glu, Phe, Gly, His, Ile, Lys, Leu, Met, Asn, Gln, Arg, Ser, Thr, Val or Tyr
  MOD_RES (30)...(30): Xaa = Ala, Phe, Gly, Ile, Lys, Leu, Met, Pro, Gln, Arg, Ser, Thr, Val, Trp or Tyr
  MOD_RES (31)...(31): Xaa = Ala, Asp, Glu, Phe, Gly, His, Lys, Leu, Met, Asn, Pro, Gln, Arg, Ser, Thr, Val or Trp
  MOD_RES (32)...(32): Xaa = Ala, Asp, Glu, Gly, Ile, Lys, Leu, Met, Asn, Pro, Gln, Arg, Ser, Thr, Val or Tyr
  MOD_RES (33)...(33): Xaa = Ala, Asp, Glu, Phe, Gly, His, Ile, Lys, Leu, Met, Asn, Gln, Ser, Thr or Val
  MOD_RES (34)...(34): Xaa = Glu, Phe, Gly, His, Ile, Lys, Leu, Met, Asn, Pro, Gln, Arg, Ser, Thr or Trp
  MOD_RES (35)...(35): Xaa = Ala, Asp, Glu, Phe, Gly, His, Lys, Leu, Met, Asn, Pro, Gln, Arg, Ser, Thr, Val or Tyr
CXXXXXXCXXXCXXXXXXXXXCXCXXXXXXXXXXXC

SEQ ID NO: 292 - protein, 37 aa, Artificial Sequence
  EGF domain monomer sequence
  MOD_RES (2)...(2): Xaa = Ala, Asp, Glu, Phe, Gly, Ile, Lys, Leu, Met, Asn, Pro, Gln, Arg, Ser, Thr, Val or Tyr
  MOD_RES (3)...(3): Xaa = Ala, Asp, Glu, Phe, Gly, His, Ile, Lys, Leu, Met, Asn, Pro, Gln, Arg, Ser, Thr, Val or Tyr
  MOD_RES (4)...(4): Xaa = Ala, Asp, Glu, Phe, Gly, His, Ile, Lys, Leu, Met, Asn, Pro, Gln, Arg, Ser, Thr, Val or Trp
  MOD_RES (5)...(5): Xaa = Ala, Asp, Glu, Phe, Gly, His, Ile, Lys, Leu, Met, Asn, Pro, Gln, Arg, Ser, Thr or Val
  MOD_RES (6)...(6): Xaa = Ala, Asp, Glu, Phe, Gly, His, Ile, Lys, Leu, Asn, Pro, Gln, Arg, Ser, Val or Tyr
  MOD_RES (7)...(7): Xaa = Ala, Asp, Glu, Gly, Ile, Lys, Leu, Met, Asn, Pro, Gln, Arg, Ser, Thr, Val or Tyr
  MOD_RES (9)...(9): Xaa = Ala, Asp, Glu, Gly, His, Lys, Asn, Pro, Gln, Ser, Thr or Val
  MOD_RES (10)...(10): Xaa = Phe, Gly, His, Leu, Asn, Gln, Ser, Thr or Tyr
  MOD_RES (11)...(11): Xaa = Ala, Asp, Glu, Phe, Gly, His, Ile, Lys, Leu, Asn, Gln, Arg, Ser, Thr, Val or Tyr
  MOD_RES (13)...(13): Xaa = Ala, Asp, Phe, His, Ile, Lys, Leu, Met, Asn, Gln, Arg, Ser, Thr, Val or Tyr
  MOD_RES (14)...(14): Xaa = Ala, Asp, Glu, Phe, His, Leu, Met, Asn, Pro, Gln, Arg, Ser, Val or Tyr
  MOD_RES (15)...(15): Xaa = Ala, Asp, Glu, Phe, Gly, His, Leu, Asn, Arg, Ser, Thr, Val or Tyr
  MOD_RES (16)...(16): Xaa = Ala, Asp, Glu, Gly, Asn, Pro, Gln, Arg, Ser or Thr
  MOD_RES (17)...(17): Xaa = Ala, Asp, Glu, Phe, Gly, Lys, Leu, Asn, Pro, Gln, Arg, Ser or Thr
  MOD_RES (18)...(18): Xaa = Ala, Asp, Glu, Gly, Met, Asn, Arg, Ser, Thr, Val or Tyr
  MOD_RES (19)...(19): Xaa = Ala, Asp, Glu, Gly, Lys, Leu, Met, Gln, Arg, Ser or Thr
  MOD_RES (20)...(20): Xaa = Phe, His, Ile, Pro, Arg, Val, Trp or Tyr
  MOD_RES (21)...(21): Xaa = Ala, Glu, His, Lys, Leu, Gln, Ser, Thr, Val or Tyr
  MOD_RES (23)...(23): Xaa = Ala, Asp, Glu, Phe, Gly, His, Ile, Lys, Leu, Met, Asn, Pro, Gln, Arg, Ser, Thr, Val, Trp or Tyr
  MOD_RES (25)...(25): Xaa = Ala, Asp, Glu, Phe, Gly, His, Ile, Lys, Leu, Asn, Pro, Gln, Arg, Ser, Thr, Val or Tyr
  MOD_RES (26)...(26): Xaa = Ala, Asp, Glu, Phe, His, Ile, Lys, Leu, Met, Asn, Pro, Gln, Arg, Ser, Thr or Val
  MOD_RES (27)...(27): Xaa = Asp, Glu, Gly, Asn, Pro or Ser
  MOD_RES (28)...(28): Xaa = Ala, Asp, Glu, Phe, His, Leu, Met, Gln, Arg, Ser, Thr, Trp or Tyr
  MOD_RES (29)...(29): Xaa = Ala, Asp, Glu, Phe, Gly, His, Ile, Lys, Leu, Met, Asn, Gln, Arg, Ser, Thr, Val or Tyr
  MOD_RES (30)...(30): Xaa = Ala, Phe, Gly, Ile, Lys, Leu, Met, Pro, Gln, Arg, Ser, Thr, Val, Trp or Tyr
  MOD_RES (31)...(31): Xaa = Ala, Asp, Glu, Phe, Gly, His, Lys, Leu, Met, Asn, Pro, Gln, Arg, Ser, Thr, Val or Trp
  MOD_RES (32)...(32): Xaa = Ala, Asp, Glu, Gly, Ile, Lys, Leu, Met, Asn, Pro, Gln, Arg, Ser, Thr, Val or Tyr
  MOD_RES (33)...(33): Xaa = Ala, Asp, Glu, Phe, Gly, His, Ile, Lys, Leu, Met, Asn, Gln, Ser, Thr or Val
  MOD_RES (34)...(34): Xaa = Glu, Phe, Gly, His, Ile, Lys, Leu, Met, Asn, Pro, Gln, Arg, Ser, Thr or Trp
  MOD_RES (35)...(35): Xaa = Ala, Asp, Glu, Phe, Gly, His, Lys, Leu, Met, Asn, Pro, Gln, Arg, Ser, Thr, Val or Tyr
  MOD_RES (36)...(36): Xaa = Ala, Asp, Glu, Phe, Gly, His, Ile, Lys, Met, Asn, Gln, Arg, Ser, Thr, Val or Tyr
CXXXXXXCXXXCXXXXXXXXXCXCXXXXXXXXXXXXC

SEQ ID NO: 293 - protein, 32 aa, Artificial Sequence
  EGF domain monomer sequence
  MOD_RES (2)...(2): Xaa = Ala, Asp, Glu, Phe, Gly, His, Ile, Lys, Leu, Asn, Pro, Gln, Arg, Ser, Thr, Val or Trp
  MOD_RES (3)...(3): Xaa = Ala, Asp, Glu, Gly, His, Lys, Leu, Met, Asn, Pro, Arg, Ser, Thr or Tyr
  MOD_RES (4)...(4): Xaa = Ala, Asp, Glu, Gly, His, Lys, Leu, Met, Asn, Pro, Gln, Arg, Ser, Thr, Val or Trp
  MOD_RES (5)...(5): Xaa = Ala, Glu, Gly, Met, Asn, Pro, Gln, Arg, Ser, Thr or Tyr
  MOD_RES (7)...(7): Xaa = Ala, Asp, Glu, Phe, Gly, His, Ile, Lys, Leu, Met, Asn, Pro, Gln, Arg, Ser, Thr or Val
  MOD_RES (8)...(8): Xaa = Ala, Asp, Glu, Phe, Gly, His, Lys, Leu, Asn, Pro, Gln, Arg, Ser, Thr or Tyr
  MOD_RES (9)...(9): Xaa = Ala, Gly or Thr
  MOD_RES (10)...(10): Xaa = Ala, Asp, Glu, Phe, His, Ile, Lys, Leu, Met, Asn, Gln, Arg, Ser, Thr or Val
  MOD_RES (12)...(12): Xaa = Ala, Asp, Phe, His, Ile, Lys, Leu, Met, Asn, Gln, Arg, Ser, Thr, Val or Tyr
  MOD_RES (13)...(13): Xaa = Ala, Asp, Glu, Phe, His, Leu, Met, Asn, Pro, Gln, Arg, Ser, Val or Tyr
  MOD_RES (14)...(14): Xaa = Ala, Asp, Glu, Phe, Gly, His, Leu, Asn, Arg, Ser, Thr, Val or Tyr
  MOD_RES (15)...(15): Xaa = Ala, Asp, Glu, Gly, Asn, Pro, Gln, Arg, Ser or Thr
  MOD_RES (16)...(16): Xaa = Ala, Asp, Glu, Phe, Gly, Lys, Leu, Asn, Pro, Gln, Arg, Ser or Thr
  MOD_RES (17)...(17): Xaa = Ala, Asp, Glu, Gly, Met, Asn, Arg, Ser, Thr, Val or Tyr
  MOD_RES (18)...(18): Xaa = Ala, Asp, Glu, Gly, Lys, Leu, Met, Gln, Arg, Ser or Thr
  MOD_RES (19)...(19): Xaa = Phe, His, Ile, Pro, Arg, Val, Trp or Tyr
  MOD_RES (20)...(20): Xaa = Ala, Glu, His, Lys, Leu, Gln, Ser, Thr, Val or Tyr
  MOD_RES (22)...(22): Xaa = Ala, Asp, Glu, Phe, Gly, His, Ile, Lys, Leu, Met, Asn, Pro, Gln, Arg, Ser, Thr, Val, Trp or Tyr
  MOD_RES (24)...(24): Xaa = Ala, Asp, Glu, Phe, His, Lys, Leu, Met, Asn, Pro, Gln, Arg, Ser, Thr, Val, Trp or Tyr
  MOD_RES (25)...(25): Xaa = Ala, Asp, Glu, Phe, Gly, His, Lys, Leu, Asn, Pro, Gln, Arg, Ser, Thr, Val or Tyr
  MOD_RES (26)...(26): Xaa = Ala, Glu, Gly, His, Lys, Leu, Asn, Pro, Arg, Ser, Thr or Tyr
  MOD_RES (27)...(27): Xaa = Phe, His, Ile, Leu, Met, Arg, Thr, Trp or Tyr
  MOD_RES (28)...(28): Xaa = Ala, Asp, Glu, Phe, Gly, His, Ile, Lys, Leu, Met, Asn, Gln, Arg, Ser, Thr, Val or Tyr
  MOD_RES (29)...(29): Xaa = Asp, Gly or Ser
  MOD_RES (30)...(30): Xaa = Ala, Asp, Glu, Phe, His, Ile, Lys, Leu, Asn, Pro, Gln, Arg, Ser, Thr, Val or Tyr
  MOD_RES (31)...(31): Xaa = Ala, Asp, Glu, Phe, His, Ile, Lys, Leu, Met, Asn, Gln, Arg, Ser, Thr or Tyr
CXXXXCXXXXCXXXXXXXXXCXCXXXXXXXXC

SEQ ID NO: 294 - protein, 33 aa, Artificial Sequence
  EGF domain monomer sequence
  MOD_RES (2)...(2): Xaa = Ala, Asp, Glu, Phe, Gly, His, Ile, Lys, Leu, Asn, Pro, Gln, Arg, Ser, Thr, Val or Trp
  MOD_RES (3)...(3): Xaa = Ala, Asp, Glu, Gly, His, Lys, Leu, Met, Asn, Pro, Arg, Ser, Thr or Tyr
  MOD_RES (4)...(4): Xaa = Ala, Asp, Glu, Gly, His, Lys, Leu, Met, Asn, Pro, Gln, Arg, Ser, Thr, Val or Trp
  MOD_RES (5)...(5): Xaa = Ala, Glu, Gly, Met, Asn, Pro, Gln, Arg, Ser, Thr or Tyr
  MOD_RES (7)...(7): Xaa = Ala, Asp, Glu, Phe, Gly, His, Ile, Lys, Leu, Met, Asn, Pro, Gln, Arg, Ser, Thr or Val
  MOD_RES (8)...(8): Xaa = Ala, Asp, Glu, Phe, Gly, His, Lys, Leu, Asn, Pro, Gln, Arg, Ser, Thr or Tyr
  MOD_RES (9)...(9): Xaa = Ala, Gly or Thr
  MOD_RES (10)...(10): Xaa = Ala, Asp, Glu, Phe, His, Ile, Lys, Leu, Met, Asn, Gln, Arg, Ser, Thr or Val
  MOD_RES (12)...(12): Xaa = Ala, Asp, Phe, His, Ile, Lys, Leu, Met, Asn, Gln, Arg, Ser, Thr, Val or Tyr
  MOD_RES (13)...(13): Xaa = Ala, Asp, Glu, Phe, His, Leu, Met, Asn, Pro, Gln, Arg, Ser, Val or Tyr
  MOD_RES (14)...(14): Xaa = Ala, Asp, Glu, Phe, Gly, His, Leu, Asn, Arg, Ser, Thr, Val or Tyr
  MOD_RES (15)...(15): Xaa = Ala, Asp, Glu, Gly, Asn, Pro, Gln, Arg, Ser or Thr
  MOD_RES (16)...(16): Xaa = Ala, Asp, Glu, Phe, Gly, Lys, Leu, Asn, Pro, Gln, Arg, Ser or Thr
  MOD_RES (17)...(17): Xaa = Ala, Asp, Glu, Gly, Met, Asn, Arg, Ser, Thr, Val or Tyr
  MOD_RES (18)...(18): Xaa = Ala, Asp, Glu, Gly, Lys, Leu, Met, Gln, Arg, Ser or Thr
  MOD_RES (19)...(19): Xaa = Phe, His, Ile, Pro, Arg, Val, Trp or Tyr
  MOD_RES (20)...(20): Xaa = Ala, Glu, His, Lys, Leu, Gln, Ser, Thr, Val or Tyr
  MOD_RES (22)...(22): Xaa = Ala, Asp, Glu, Phe, Gly, His, Ile, Lys, Leu, Met, Asn, Pro, Gln, Arg, Ser, Thr, Val, Trp or Tyr
  MOD_RES (24)...(24): Xaa = Ala, Asp, Glu, Phe, Gly, His, Ile, Lys, Leu, Asn, Pro, Gln, Arg, Ser, Thr, Val or Tyr
  MOD_RES (25)...(25): Xaa = Ala, Asp, Glu, Phe, His, Ile, Lys, Leu, Met, Asn, Pro, Gln, Arg, Ser, Thr or Val
  MOD_RES (26)...(26): Xaa = Asp, Glu, Gly, Asn, Pro or Ser
  MOD_RES (27)...(27): Xaa = Ala, Asp, Glu, Phe, His, Leu, Met, Gln, Arg, Ser, Thr, Trp or Tyr
  MOD_RES (28)...(28): Xaa = Ala, Asp, Glu, Phe, Gly, His, Ile, Lys, Leu, Met, Asn, Gln, Arg, Ser, Thr, Val or Tyr
  MOD_RES (29)...(29): Xaa = Ala, Phe, Gly, Ile, Lys, Leu, Met, Pro, Gln, Arg, Ser, Thr, Val, Trp or Tyr
  MOD_RES (30)...(30): Xaa = Ala, Asp, Glu, Phe, Gly, His, Lys, Leu, Met, Asn, Pro, Gln, Arg, Ser, Thr, Val or Trp
  MOD_RES (31)...(31): Xaa = Ala, Asp, Glu, Gly, Ile, Lys, Leu, Met, Asn, Pro, Gln, Arg, Ser, Thr, Val or Tyr
  MOD_RES (32)...(32): Xaa = Ala, Asp, Glu, Phe, Gly, His, Ile, Lys, Leu, Met, Asn, Gln, Ser, Thr or Val
CXXXXCXXXXCXXXXXXXXXCXCXXXXXXXXXC

SEQ ID NO: 295 - protein, 34 aa, Artificial Sequence
  EGF domain monomer sequence
  MOD_RES (2)...(2): Xaa = Ala, Asp, Glu, Phe, Gly, His, Ile, Lys, Leu, Asn, Pro, Gln, Arg, Ser, Thr, Val or Trp
  MOD_RES (3)...(3): Xaa = Ala, Asp, Glu, Gly, His, Lys, Leu, Met, Asn, Pro, Arg, Ser, Thr or Tyr
  MOD_RES (4)...(4): Xaa = Ala, Asp, Glu, Gly, His, Lys, Leu, Met, Asn, Pro, Gln, Arg, Ser, Thr, Val or Trp
  MOD_RES (5)...(5): Xaa = Ala, Glu, Gly, Met, Asn, Pro, Gln, Arg, Ser, Thr or Tyr
  MOD_RES (7)...(7): Xaa = Ala, Asp, Glu, Phe, Gly, His, Ile, Lys, Leu, Met, Asn, Pro, Gln, Arg, Ser, Thr or Val
  MOD_RES (8)...(8): Xaa = Ala, Asp, Glu, Phe, Gly, His, Lys, Leu, Asn, Pro, Gln, Arg, Ser, Thr or Tyr
  MOD_RES (9)...(9): Xaa = Ala, Gly or Thr
  MOD_RES (10)...(10): Xaa = Ala, Asp, Glu, Phe, His, Ile, Lys, Leu, Met, Asn, Gln, Arg, Ser, Thr or Val
  MOD_RES (12)...(12): Xaa = Ala, Asp, Phe, His, Ile, Lys, Leu, Met, Asn, Gln, Arg, Ser, Thr, Val or Tyr
  MOD_RES (13)...(13): Xaa = Ala, Asp, Glu, Phe, His, Leu, Met, Asn, Pro, Gln, Arg, Ser, Val or Tyr
  MOD_RES (14)...(14): Xaa = Ala, Asp, Glu, Phe, Gly, His, Leu, Asn, Arg, Ser, Thr, Val or Tyr
  MOD_RES (15)...(15): Xaa = Ala, Asp, Glu, Gly, Asn, Pro, Gln, Arg, Ser or Thr
  MOD_RES (16)...(16): Xaa = Ala, Asp, Glu, Phe, Gly, Lys, Leu, Asn, Pro, Gln, Arg, Ser or Thr
  MOD_RES (17)...(17): Xaa = Ala, Asp, Glu, Gly, Met, Asn, Arg, Ser, Thr, Val or Tyr
  MOD_RES (18)...(18): Xaa = Ala, Asp, Glu, Gly, Lys, Leu, Met, Gln, Arg, Ser or Thr
  MOD_RES (19)...(19): Xaa = Phe, His, Ile, Pro, Arg, Val, Trp or Tyr
  MOD_RES (20)...(20): Xaa = Ala, Glu, His, Lys, Leu, Gln, Ser, Thr, Val or Tyr
  MOD_RES (22)...(22): Xaa = Ala, Asp, Glu, Phe, Gly, His, Ile, Lys, Leu, Met, Asn, Pro, Gln, Arg, Ser, Thr, Val, Trp or Tyr
  MOD_RES (24)...(24): Xaa = Ala, Asp, Glu, Phe, Gly, His, Ile, Lys, Leu, Asn, Pro, Gln, Arg, Ser, Thr, Val or Tyr
  MOD_RES (25)...(25): Xaa = Ala, Asp, Glu, Phe, His, Ile, Lys, Leu, Met, Asn, Pro, Gln, Arg, Ser, Thr or Val
  MOD_RES (26)...(26): Xaa = Asp, Glu, Gly, Asn, Pro or Ser
  MOD_RES (27)...(27): Xaa = Ala, Asp, Glu, Phe, His, Leu, Met, Gln, Arg, Ser, Thr, Trp or Tyr
  MOD_RES (28)...(28): Xaa = Ala, Asp, Glu, Phe, Gly, His, Ile, Lys, Leu, Met, Asn, Gln, Arg, Ser, Thr, Val or Tyr
  MOD_RES (29)...(29): Xaa = Ala, Phe, Gly, Ile, Lys, Leu, Met, Pro, Gln, Arg, Ser, Thr, Val, Trp or Tyr
  MOD_RES (30)...(30): Xaa = Ala, Asp, Glu, Phe, Gly, His, Lys, Leu, Met, Asn, Pro, Gln, Arg, Ser, Thr, Val or Trp
  MOD_RES (31)...(31): Xaa = Ala, Asp, Glu, Gly, Ile, Lys, Leu, Met, Asn, Pro, Gln, Arg, Ser, Thr, Val or Tyr
  MOD_RES (32)...(32): Xaa = Ala, Asp, Glu, Phe, Gly, His, Ile, Lys, Leu, Met, Asn, Gln, Ser, Thr or Val
  MOD_RES (33)...(33): Xaa = Glu, Phe, Gly, His, Ile, Lys, Leu, Met, Asn, Pro, Gln, Arg, Ser, Thr or Trp
CXXXXCXXXXCXXXXXXXXXCXCXXXXXXXXXXC

SEQ ID NO: 296 - protein, 35 aa, Artificial Sequence
  EGF domain monomer sequence
  MOD_RES (2)...(2): Xaa = Ala, Asp, Glu, Phe, Gly, His, Ile, Lys, Leu, Asn, Pro, Gln, Arg, Ser, Thr, Val or Trp
  MOD_RES (3)...(3): Xaa = Ala, Asp, Glu, Gly, His, Lys, Leu, Met, Asn, Pro, Arg, Ser, Thr or Tyr
  MOD_RES (4)...(4): Xaa = Ala, Asp, Glu, Gly, His, Lys, Leu, Met, Asn, Pro, Gln, Arg, Ser, Thr, Val or Trp
  MOD_RES (5)...(5): Xaa = Ala, Glu, Gly, Met, Asn, Pro, Gln, Arg, Ser, Thr or Tyr
  MOD_RES (7)...(7): Xaa = Ala, Asp, Glu, Phe, Gly, His, Ile, Lys, Leu, Met, Asn, Pro, Gln, Arg, Ser, Thr or Val
  MOD_RES (8)...(8): Xaa = Ala, Asp, Glu, Phe, Gly, His, Lys, Leu, Asn, Pro, Gln, Arg, Ser, Thr or Tyr
  MOD_RES (9)...(9): Xaa = Ala, Gly or Thr
  MOD_RES (10)...(10): Xaa = Ala, Asp, Glu, Phe, His, Ile, Lys, Leu, Met, Asn, Gln, Arg, Ser, Thr or Val
  MOD_RES (12)...(12): Xaa = Ala, Asp, Phe, His, Ile, Lys, Leu, Met, Asn, Gln, Arg, Ser, Thr, Val or Tyr
  MOD_RES (13)...(13): Xaa = Ala, Asp, Glu, Phe, His, Leu, Met, Asn, Pro, Gln, Arg, Ser, Val or Tyr
  MOD_RES (14)...(14): Xaa = Ala, Asp, Glu, Phe, Gly, His, Leu, Asn, Arg, Ser, Thr, Val or Tyr
  MOD_RES (15)...(15): Xaa = Ala, Asp, Glu, Gly, Asn, Pro, Gln, Arg, Ser or Thr
  MOD_RES (16)...(16): Xaa = Ala, Asp, Glu, Phe, Gly, Lys, Leu, Asn, Pro, Gln, Arg, Ser or Thr
  MOD_RES (17)...(17): Xaa = Ala, Asp, Glu, Gly, Met, Asn, Arg, Ser, Thr, Val or Tyr
  MOD_RES (18)...(18): Xaa = Ala, Asp, Glu, Gly, Lys, Leu, Met, Gln, Arg, Ser or Thr
  MOD_RES (19)...(19): Xaa = Phe, His, Ile, Pro, Arg, Val, Trp or Tyr
  MOD_RES (20)...(20): Xaa = Ala, Glu, His, Lys, Leu, Gln, Ser, Thr, Val or Tyr
  MOD_RES (22)...(22): Xaa = Ala, Asp, Glu, Phe, Gly, His, Ile, Lys, Leu, Met, Asn, Pro, Gln, Arg, Ser, Thr, Val, Trp or Tyr
  MOD_RES (24)...(24): Xaa = Ala, Asp, Glu, Phe, Gly, His, Ile, Lys, Leu, Asn, Pro, Gln, Arg, Ser, Thr, Val or Tyr
  MOD_RES (25)...(25): Xaa = Ala, Asp, Glu, Phe, His, Ile, Lys, Leu, Met, Asn, Pro, Gln, Arg, Ser, Thr or Val
  MOD_RES (26)...(26): Xaa = Asp, Glu, Gly, Asn, Pro or Ser
  MOD_RES (27)...(27): Xaa = Ala, Asp, Glu, Phe, His, Leu, Met, Gln, Arg, Ser, Thr, Trp or Tyr
  MOD_RES (28)...(28): Xaa = Ala, Asp, Glu, Phe, Gly, His, Ile, Lys, Leu, Met, Asn, Gln, Arg, Ser, Thr, Val or Tyr
  MOD_RES (29)...(29): Xaa = Ala, Phe, Gly, Ile, Lys, Leu, Met, Pro, Gln, Arg, Ser, Thr, Val, Trp or Tyr
  MOD_RES (30)...(30): Xaa = Ala, Asp, Glu, Phe, Gly, His, Lys, Leu, Met, Asn, Pro, Gln, Arg, Ser, Thr, Val or Trp
  MOD_RES (31)...(31): Xaa = Ala, Asp, Glu, Gly, Ile, Lys, Leu, Met, Asn, Pro, Gln, Arg, Ser, Thr, Val or Tyr
  MOD_RES (32)...(32): Xaa = Ala, Asp, Glu, Phe, Gly, His, Ile, Lys, Leu, Met, Asn, Gln, Ser, Thr or Val
  MOD_RES (33)...(33): Xaa = Glu, Phe, Gly, His, Ile, Lys, Leu, Met, Asn, Pro, Gln, Arg, Ser, Thr or Trp
  MOD_RES (34)...(34): Xaa = Ala, Asp, Glu, Phe, Gly, His, Lys, Leu, Met, Asn, Pro, Gln, Arg, Ser, Thr, Val or Tyr
CXXXXCXXXXCXXXXXXXXXCXCXXXXXXXXXXXC

SEQ ID NO: 297 - protein, 36 aa, Artificial Sequence
  EGF domain monomer sequence
  MOD_RES (2)...(2): Xaa = Ala, Asp, Glu, Phe, Gly, His, Ile, Lys, Leu, Asn, Pro, Gln, Arg, Ser, Thr, Val or Trp
  MOD_RES (3)...(3): Xaa = Ala, Asp, Glu, Gly, His, Lys, Leu, Met, Asn, Pro, Arg, Ser, Thr or Tyr
  MOD_RES (4)...(4): Xaa = Ala, Asp, Glu, Gly, His, Lys, Leu, Met, Asn, Pro, Gln, Arg, Ser, Thr, Val or Trp
  MOD_RES (5)...(5): Xaa = Ala, Glu, Gly, Met, Asn, Pro, Gln, Arg, Ser, Thr or Tyr
  MOD_RES (7)...(7): Xaa = Ala, Asp, Glu, Phe, Gly, His, Ile, Lys, Leu, Met, Asn, Pro, Gln, Arg, Ser, Thr or Val
  MOD_RES (8)...(8): Xaa = Ala, Asp, Glu, Phe, Gly, His, Lys, Leu, Asn, Pro, Gln, Arg, Ser, Thr or Tyr
  MOD_RES (9)...(9): Xaa = Ala, Gly or Thr
  MOD_RES (10)...(10): Xaa = Ala, Asp, Glu, Phe, His, Ile, Lys, Leu, Met, Asn, Gln, Arg, Ser, Thr or Val
  MOD_RES (12)...(12): Xaa = Ala, Asp, Phe, His, Ile, Lys, Leu, Met, Asn, Gln, Arg, Ser, Thr, Val or Tyr
  MOD_RES (13)...(13): Xaa = Ala, Asp, Glu, Phe, His, Leu, Met, Asn, Pro, Gln, Arg, Ser, Val or Tyr
  MOD_RES (14)...(14): Xaa = Ala, Asp, Glu, Phe, Gly, His, Leu, Asn, Arg, Ser, Thr, Val or Tyr
  MOD_RES (15)...(15): Xaa = Ala, Asp, Glu, Gly, Asn, Pro, Gln, Arg, Ser or Thr
  MOD_RES (16)...(16): Xaa = Ala, Asp, Glu, Phe, Gly, Lys, Leu, Asn, Pro, Gln, Arg, Ser or Thr
  MOD_RES (17)...(17): Xaa = Ala, Asp, Glu, Gly, Met, Asn, Arg, Ser, Thr, Val or Tyr
  MOD_RES (18)...(18): Xaa = Ala, Asp, Glu, Gly, Lys, Leu, Met, Gln, Arg, Ser or Thr
  MOD_RES (19)...(19): Xaa = Phe, His, Ile, Pro, Arg, Val, Trp or Tyr
  MOD_RES (20)...(20): Xaa = Ala, Glu, His, Lys, Leu, Gln, Ser, Thr, Val or Tyr
  MOD_RES (22)...(22): Xaa = Ala, Asp, Glu, Phe, Gly, His, Ile, Lys, Leu, Met, Asn, Pro, Gln, Arg, Ser, Thr, Val, Trp or Tyr
  MOD_RES (24)...(24): Xaa = Ala, Asp, Glu, Phe, Gly, His, Ile, Lys, Leu, Asn, Pro, Gln, Arg, Ser, Thr, Val or Tyr
  MOD_RES (25)...(25): Xaa = Ala, Asp, Glu, Phe, His, Ile, Lys, Leu, Met, Asn, Pro, Gln, Arg, Ser, Thr or Val
  MOD_RES (26)...(26): Xaa = Asp, Glu, Gly, Asn, Pro or Ser
  MOD_RES (27)...(27): Xaa = Ala, Asp, Glu, Phe, His, Leu, Met, Gln, Arg, Ser, Thr, Trp or Tyr
  MOD_RES (28)...(28): Xaa = Ala, Asp, Glu, Phe, Gly, His, Ile, Lys, Leu, Met, Asn, Gln, Arg, Ser, Thr, Val or Tyr
  MOD_RES (29)...(29): Xaa = Ala, Phe, Gly, Ile, Lys, Leu, Met, Pro, Gln, Arg, Ser, Thr, Val, Trp or Tyr
  MOD_RES (30)...(30): Xaa = Ala, Asp, Glu, Phe, Gly, His, Lys, Leu, Met, Asn, Pro, Gln, Arg, Ser, Thr, Val or Trp
  MOD_RES (31)...(31): Xaa = Ala, Asp, Glu, Gly, Ile, Lys, Leu, Met, Asn, Pro, Gln, Arg, Ser, Thr, Val or Tyr
  MOD_RES (32)...(32): Xaa = Ala, Asp, Glu, Phe, Gly, His, Ile, Lys, Leu, Met, Asn, Gln, Ser, Thr or Val
  MOD_RES (33)...(33): Xaa = Glu, Phe, Gly, His, Ile, Lys, Leu, Met, Asn, Pro, Gln, Arg, Ser, Thr or Trp
  MOD_RES (34)...(34): Xaa = Ala, Asp, Glu, Phe, Gly, His, Lys, Leu, Met, Asn, Pro, Gln, Arg, Ser, Thr, Val or Tyr
  MOD_RES (35)...(35): Xaa = Ala, Asp, Glu, Phe, Gly, His, Ile, Lys, Met, Asn, Gln, Arg, Ser, Thr, Val or Tyr
CXXXXCXXXXCXXXXXXXXXCXCXXXXXXXXXXXXC

SEQ ID NO: 298 - protein, 33 aa, Artificial Sequence
  EGF domain monomer sequence
  MOD_RES (2)...(2): Xaa = Ala, Asp, Glu, Phe, Gly, His, Ile, Lys, Leu, Asn, Pro, Gln, Arg, Ser, Thr, Val or Trp
  MOD_RES (3)...(3): Xaa = Ala, Asp, Glu, Gly, His, Lys, Leu, Met, Asn, Pro, Arg, Ser, Thr or Tyr
  MOD_RES (4)...(4): Xaa = Ala, Asp, Glu, Gly, His, Lys, Leu, Met, Asn, Pro, Gln, Arg, Ser, Thr, Val or Trp
  MOD_RES (5)...(5): Xaa = Ala, Glu, Gly, Met, Asn, Pro, Gln, Arg, Ser, Thr or Tyr
  MOD_RES (7)...(7): Xaa = Ala, Cys, Asp, Glu, Phe, Gly, His, Lys, Leu, Met, Asn, Pro, Gln, Arg, Ser, Val or Tyr
  MOD_RES (8)...(8): Xaa = Ala, Asp, Glu, Gly, His, Ile, Lys, Leu, Met, Asn, Pro, Gln, Arg, Ser, Thr, Val or Tyr
  MOD_RES (9)...(9): Xaa = Ala, Asp, Glu, Phe, Gly, His, Lys, Leu, Asn, Gln, Arg, Ser, Thr or Tyr
  MOD_RES (10)...(10): Xaa = Ala, Phe, Gly, His, Gln, Ser, Thr or Val
  MOD_RES (11)...(11): Xaa = Ala, Asp, Glu, Phe, His, Ile, Lys, Leu, Met, Asn, Gln, Arg, Ser, Thr or Val
  MOD_RES (13)...(13): Xaa = Ala, Asp, Phe, His, Ile, Lys, Leu, Met, Asn, Gln, Arg, Ser, Thr, Val or Tyr
  MOD_RES (14)...(14): Xaa = Ala, Asp, Glu, Phe, His, Leu, Met, Asn, Pro, Gln, Arg, Ser, Val or Tyr
  MOD_RES (15)...(15): Xaa = Ala, Asp, Glu, Phe, Gly, His, Leu, Asn, Arg, Ser, Thr, Val or Tyr
  MOD_RES (16)...(16): Xaa = Ala, Asp, Glu, Gly, Asn, Pro, Gln, Arg, Ser or Thr
  MOD_RES (17)...(17): Xaa = Ala, Asp, Glu, Phe, Gly, Lys, Leu, Asn, Pro, Gln, Arg, Ser or Thr
  MOD_RES (18)...(18): Xaa = Ala, Asp, Glu, Gly, Met, Asn, Arg, Ser, Thr, Val or Tyr
  MOD_RES (19)...(19): Xaa = Ala, Asp, Glu, Gly, Lys, Leu, Met, Gln, Arg, Ser or Thr
  MOD_RES (20)...(20): Xaa = Phe, His, Ile, Pro, Arg, Val, Trp or Tyr
  MOD_RES (21)...(21): Xaa = Ala, Glu, His, Lys, Leu, Gln, Ser, Thr, Val or Tyr
  MOD_RES (23)...(23): Xaa = Ala, Asp, Glu, Phe, Gly, His, Ile, Lys, Leu, Met, Asn, Pro, Gln, Arg, Ser, Thr, Val, Trp or Tyr
  MOD_RES (25)...(25): Xaa = Ala, Asp, Glu, Phe, His, Lys, Leu, Met, Asn, Pro, Gln, Arg, Ser, Thr, Val, Trp or Tyr
  MOD_RES (26)...(26): Xaa = Ala, Asp, Glu, Phe, Gly, His, Lys, Leu, Asn, Pro, Gln, Arg, Ser, Thr, Val or Tyr
  MOD_RES (27)...(27): Xaa = Ala, Glu, Gly, His, Lys, Leu, Asn, Pro, Arg, Ser, Thr or Tyr
  MOD_RES (28)...(28): Xaa = Phe, His, Ile, Leu, Met, Arg, Thr, Trp or Tyr
  MOD_RES (29)...(29): Xaa = Ala, Asp, Glu, Phe, Gly, His, Ile, Lys, Leu, Met, Asn, Gln, Arg, Ser, Thr, Val or Tyr
  MOD_RES (30)...(30): Xaa = Asp, Gly or Ser
  MOD_RES (31)...(31): Xaa = Ala, Asp, Glu, Phe, His, Ile, Lys, Leu, Asn, Pro, Gln, Arg, Ser, Thr, Val or Tyr
  MOD_RES (32)...(32): Xaa = Ala, Asp, Glu, Phe, His, Ile, Lys, Leu, Met, Asn, Gln, Arg, Ser, Thr or Tyr
CXXXXCXXXXXCXXXXXXXXXCXCXXXXXXXXC

SEQ ID NO: 299 - protein, 34 aa, Artificial Sequence
  EGF domain monomer sequence
  MOD_RES (2)...(2): Xaa = Ala, Asp, Glu, Phe, Gly, His, Ile, Lys, Leu, Asn, Pro, Gln, Arg, Ser, Thr, Val or Trp
  MOD_RES (3)...(3): Xaa = Ala, Asp, Glu, Gly, His, Lys, Leu, Met, Asn, Pro, Arg, Ser, Thr or Tyr
  MOD_RES (4)...(4): Xaa = Ala, Asp, Glu, Gly, His, Lys, Leu, Met, Asn, Pro, Gln, Arg, Ser, Thr, Val or Trp
  MOD_RES (5)...(5): Xaa = Ala, Glu, Gly, Met, Asn, Pro, Gln, Arg, Ser, Thr or Tyr
  MOD_RES (7)...(7): Xaa = Ala, Cys, Asp, Glu, Phe, Gly, His, Lys, Leu, Met, Asn, Pro, Gln, Arg, Ser, Val or Tyr
  MOD_RES (8)...(8): Xaa = Ala, Asp, Glu, Gly, His, Ile, Lys, Leu, Met, Asn, Pro, Gln, Arg, Ser, Thr, Val or Tyr
  MOD_RES (9)...(9): Xaa = Ala, Asp, Glu, Phe, Gly, His, Lys, Leu, Asn, Gln, Arg, Ser, Thr or Tyr
  MOD_RES (10)...(10): Xaa = Ala, Phe, Gly, His, Gln, Ser, Thr or Val
  MOD_RES (11)...(11): Xaa = Ala, Asp, Glu, Phe, His, Ile, Lys, Leu, Met, Asn, Gln, Arg, Ser, Thr or Val
  MOD_RES (13)...(13): Xaa = Ala, Asp, Phe, His, Ile, Lys, Leu, Met, Asn, Gln, Arg, Ser, Thr, Val or Tyr
  MOD_RES (14)...(14): Xaa = Ala, Asp, Glu, Phe, His, Leu, Met, Asn, Pro, Gln, Arg, Ser, Val or Tyr
  MOD_RES (15)...(15): Xaa = Ala, Asp, Glu, Phe, Gly, His, Leu, Asn, Arg, Ser, Thr, Val or Tyr
  MOD_RES (16)...(16): Xaa = Ala, Asp, Glu, Gly, Asn, Pro, Gln, Arg, Ser or Thr
  MOD_RES (17)...(17): Xaa = Ala, Asp, Glu, Phe, Gly, Lys, Leu, Asn, Pro, Gln, Arg, Ser or Thr
  MOD_RES (18)...(18): Xaa = Ala, Asp, Glu, Gly, Met, Asn, Arg, Ser, Thr, Val or Tyr
  MOD_RES (19)...(19): Xaa = Ala, Asp, Glu, Gly, Lys, Leu, Met, Gln, Arg, Ser or Thr
  MOD_RES (20)...(20): Xaa = Phe, His, Ile, Pro, Arg, Val, Trp or Tyr
  MOD_RES (21)...(21): Xaa = Ala, Glu, His, Lys, Leu, Gln, Ser, Thr, Val or Tyr
  MOD_RES (23)...(23): Xaa = Ala, Asp, Glu, Phe, Gly, His, Ile, Lys, Leu, Met, Asn, Pro, Gln, Arg, Ser, Thr, Val, Trp or Tyr
  MOD_RES (25)...(25): Xaa = Ala, Asp, Glu, Phe, Gly, His, Ile, Lys, Leu, Asn, Pro, Gln, Arg, Ser, Thr, Val or Tyr
  MOD_RES (26)...(26): Xaa = Ala, Asp, Glu, Phe, His, Ile, Lys, Leu, Met, Asn, Pro, Gln, Arg, Ser, Thr or Val
  MOD_RES (27)...(27): Xaa = Asp, Glu, Gly, Asn, Pro or Ser
  MOD_RES (28)...(28): Xaa = Ala, Asp, Glu, Phe, His, Leu, Met, Gln, Arg, Ser, Thr, Trp or Tyr
  MOD_RES (29)...(29): Xaa = Ala, Asp, Glu, Phe, Gly, His, Ile, Lys, Leu, Met, Asn, Gln, Arg, Ser, Thr, Val or Tyr
  MOD_RES (30)...(30): Xaa = Ala, Phe, Gly, Ile, Lys, Leu, Met, Pro, Gln, Arg, Ser, Thr, Val, Trp or Tyr
  MOD_RES (31)...(31): Xaa = Ala, Asp, Glu, Phe, Gly, His, Lys, Leu, Met, Asn, Pro, Gln, Arg, Ser, Thr, Val or Trp
  MOD_RES (32)...(32): Xaa = Ala, Asp, Glu, Gly, Ile, Lys, Leu, Met, Asn, Pro, Gln, Arg, Ser, Thr, Val or Tyr
  MOD_RES (33)...(33): Xaa = Ala, Asp, Glu, Phe, Gly, His, Ile, Lys, Leu, Met, Asn, Gln, Ser, Thr or Val
CXXXXCXXXXXCXXXXXXXXXCXCXXXXXXXXXC

SEQ ID NO: 300 - protein, 35 aa, Artificial Sequence
  EGF domain monomer sequence
  MOD_RES (2)...(2): Xaa = Ala, Asp, Glu, Phe, Gly, His, Ile, Lys, Leu, Asn, Pro, Gln, Arg, Ser, Thr, Val or Trp
  MOD_RES (3)...(3): Xaa = Ala, Asp, Glu, Gly, His, Lys, Leu, Met, Asn, Pro, Arg, Ser, Thr or Tyr
  MOD_RES (4)...(4): Xaa = Ala, Asp, Glu, Gly, His, Lys, Leu, Met, Asn, Pro, Gln, Arg, Ser, Thr, Val or Trp
  MOD_RES (5)...(5): Xaa = Ala, Glu, Gly, Met, Asn, Pro, Gln, Arg, Ser, Thr or Tyr
  MOD_RES (7)...(7): Xaa = Ala, Cys, Asp, Glu, Phe, Gly, His, Lys, Leu, Met, Asn, Pro, Gln, Arg, Ser, Val or Tyr
  MOD_RES (8)...(8): Xaa = Ala, Asp, Glu, Gly, His, Ile, Lys, Leu, Met, Asn, Pro, Gln, Arg, Ser, Thr, Val or Tyr
  MOD_RES (9)...(9): Xaa = Ala, Asp, Glu, Phe, Gly, His, Lys, Leu, Asn, Gln, Arg, Ser, Thr or Tyr
  MOD_RES (10)...(10): Xaa = Ala, Phe, Gly, His, Gln, Ser, Thr or Val
  MOD_RES (11)...(11): Xaa = Ala, Asp, Glu, Phe, His, Ile, Lys, Leu, Met, Asn, Gln, Arg, Ser, Thr or Val
  MOD_RES (13)...(13): Xaa = Ala, Asp, Phe, His, Ile, Lys, Leu, Met, Asn, Gln, Arg, Ser, Thr, Val or Tyr
  MOD_RES (14)...(14): Xaa = Ala, Asp, Glu, Phe, His, Leu, Met, Asn, Pro, Gln, Arg, Ser, Val or Tyr
  MOD_RES (15)...(15): Xaa = Ala, Asp, Glu, Phe, Gly, His, Leu, Asn, Arg, Ser, Thr, Val or Tyr
  MOD_RES (16)...(16): Xaa = Ala, Asp, Glu, Gly, Asn, Pro, Gln, Arg, Ser or Thr
  MOD_RES (17)...(17): Xaa = Ala, Asp, Glu, Phe, Gly, Lys, Leu, Asn, Pro, Gln, Arg, Ser or Thr
  MOD_RES (18)...(18): Xaa = Ala, Asp, Glu, Gly, Met, Asn, Arg, Ser, Thr, Val or Tyr
  MOD_RES (19)...(19): Xaa = Ala, Asp, Glu, Gly, Lys, Leu, Met, Gln, Arg, Ser or Thr
  MOD_RES (20)...(20): Xaa = Phe, His, Ile, Pro, Arg, Val, Trp or Tyr
  MOD_RES (21)...(21): Xaa = Ala, Glu, His, Lys, Leu, Gln, Ser, Thr, Val or Tyr
  MOD_RES (23)...(23): Xaa = Ala, Asp, Glu, Phe, Gly, His, Ile, Lys, Leu, Met, Asn, Pro, Gln, Arg, Ser, Thr, Val, Trp or Tyr
  MOD_RES (25)...(25): Xaa = Ala, Asp, Glu, Phe, Gly, His, Ile, Lys, Leu, Asn, Pro, Gln, Arg, Ser, Thr, Val or Tyr
  MOD_RES (26)...(26): Xaa = Ala, Asp, Glu, Phe, His, Ile, Lys, Leu, Met, Asn, Pro, Gln, Arg, Ser, Thr or Val
  MOD_RES (27)...(27): Xaa = Asp, Glu, Gly, Asn, Pro or Ser
  MOD_RES (28)...(28): Xaa = Ala, Asp, Glu, Phe, His, Leu, Met, Gln, Arg, Ser, Thr, Trp or Tyr
  MOD_RES (29)...(29): Xaa = Ala, Asp, Glu, Phe, Gly, His, Ile, Lys, Leu, Met, Asn, Gln, Arg, Ser, Thr, Val or Tyr
  MOD_RES (30)...(30): Xaa = Ala, Phe, Gly, Ile, Lys, Leu, Met, Pro, Gln, Arg, Ser, Thr, Val, Trp or Tyr
  MOD_RES (31)...(31): Xaa = Ala, Asp, Glu, Phe, Gly, His, Lys, Leu, Met, Asn, Pro, Gln, Arg, Ser, Thr, Val or Trp
  MOD_RES (32)...(32): Xaa = Ala, Asp, Glu, Gly, Ile, Lys, Leu, Met, Asn, Pro, Gln, Arg, Ser, Thr, Val or Tyr
  MOD_RES (33)...(33): Xaa = Ala, Asp, Glu, Phe, Gly, His, Ile, Lys, Leu, Met, Asn, Gln, Ser, Thr or Val
  MOD_RES (34)...(34): Xaa = Glu, Phe, Gly, His, Ile, Lys, Leu, Met, Asn, Pro, Gln, Arg, Ser, Thr or Trp
CXXXXCXXXXXCXXXXXXXXXCXCXXXXXXXXXXC

SEQ ID NO: 301 - protein, 36 aa, Artificial Sequence
  EGF domain monomer sequence
  MOD_RES (2)...(2): Xaa = Ala, Asp, Glu, Phe, Gly, His, Ile, Lys, Leu, Asn, Pro, Gln, Arg, Ser, Thr, Val or Trp
  MOD_RES (3)...(3): Xaa = Ala, Asp, Glu, Gly, His, Lys, Leu, Met, Asn, Pro, Arg, Ser, Thr or Tyr
  MOD_RES (4)...(4): Xaa = Ala, Asp, Glu, Gly, His, Lys, Leu, Met, Asn, Pro, Gln, Arg, Ser, Thr, Val or Trp
  MOD_RES (5)...(5): Xaa = Ala, Glu, Gly, Met, Asn, Pro, Gln, Arg, Ser, Thr or Tyr
  MOD_RES (7)...(7): Xaa = Ala, Cys, Asp, Glu, Phe, Gly, His, Lys, Leu, Met, Asn, Pro, Gln, Arg, Ser, Val or Tyr
  MOD_RES (8)...(8): Xaa = Ala, Asp, Glu, Gly, His, Ile, Lys, Leu, Met, Asn, Pro, Gln, Arg, Ser, Thr, Val or Tyr
  MOD_RES (9)...(9): Xaa = Ala, Asp, Glu, Phe, Gly, His, Lys, Leu, Asn, Gln, Arg, Ser, Thr or Tyr
  MOD_RES (10)...(10): Xaa = Ala, Phe, Gly, His, Gln, Ser, Thr or Val
  MOD_RES (11)...(11): Xaa = Ala, Asp, Glu, Phe, His, Ile, Lys, Leu, Met, Asn, Gln, Arg, Ser, Thr or Val
  MOD_RES (13)...(13): Xaa = Ala, Asp, Phe, His, Ile, Lys, Leu, Met, Asn, Gln, Arg, Ser, Thr, Val or Tyr
  MOD_RES (14)...(14): Xaa = Ala, Asp, Glu, Phe, His, Leu, Met, Asn, Pro, Gln, Arg, Ser, Val or Tyr
  MOD_RES (15)...(15): Xaa = Ala, Asp, Glu, Phe, Gly, His, Leu, Asn, Arg, Ser, Thr, Val or Tyr
  MOD_RES (16)...(16): Xaa = Ala, Asp, Glu, Gly, Asn, Pro, Gln, Arg, Ser or Thr
  MOD_RES (17)...(17): Xaa = Ala, Asp, Glu, Phe, Gly, Lys, Leu, Asn, Pro, Gln, Arg, Ser or Thr
  MOD_RES (18)...(18): Xaa = Ala, Asp, Glu, Gly, Met, Asn, Arg, Ser, Thr, Val or Tyr
  MOD_RES (19)...(19): Xaa = Ala, Asp, Glu, Gly, Lys, Leu, Met, Gln, Arg, Ser or Thr
  MOD_RES (20)...(20): Xaa = Phe, His, Ile, Pro, Arg, Val, Trp or Tyr
  MOD_RES (21)...(21): Xaa = Ala, Glu, His, Lys, Leu, Gln, Ser, Thr, Val or Tyr
  MOD_RES (23)...(23): Xaa = Ala, Asp, Glu, Phe, Gly, His, Ile, Lys, Leu, Met, Asn, Pro, Gln, Arg, Ser, Thr, Val, Trp or Tyr
  MOD_RES (25)...(25): Xaa = Ala, Asp, Glu, Phe, Gly, His, Ile, Lys, Leu, Asn, Pro, Gln, Arg, Ser, Thr, Val or Tyr
  MOD_RES (26)...(26): Xaa = Ala, Asp, Glu, Phe, His, Ile, Lys, Leu, Met, Asn, Pro, Gln, Arg, Ser, Thr or Val
  MOD_RES (27)...(27): Xaa = Asp, Glu, Gly, Asn, Pro or Ser
  MOD_RES (28)...(28): Xaa = Ala, Asp, Glu, Phe, His, Leu, Met, Gln, Arg, Ser, Thr, Trp or Tyr
  MOD_RES (29)...(29): Xaa = Ala, Asp, Glu, Phe, Gly, His, Ile, Lys, Leu, Met, Asn, Gln, Arg, Ser, Thr, Val or Tyr
  MOD_RES (30)...(30): Xaa = Ala, Phe, Gly, Ile, Lys, Leu, Met, Pro, Gln, Arg, Ser, Thr, Val, Trp or Tyr
  MOD_RES (31)...(31): Xaa = Ala, Asp, Glu, Phe, Gly, His, Lys, Leu, Met, Asn, Pro, Gln, Arg, Ser, Thr, Val or Trp
  MOD_RES (32)...(32): Xaa = Ala, Asp, Glu, Gly, Ile, Lys, Leu, Met, Asn, Pro, Gln, Arg, Ser, Thr, Val or Tyr
  MOD_RES (33)...(33): Xaa = Ala, Asp, Glu, Phe, Gly, His, Ile, Lys, Leu, Met, Asn, Gln, Ser, Thr or Val
  MOD_RES (34)...(34): Xaa = Glu, Phe, Gly, His, Ile, Lys, Leu, Met, Asn, Pro, Gln, Arg, Ser, Thr or Trp
  MOD_RES (35)...(35): Xaa = Ala, Asp, Glu, Phe, Gly, His, Lys, Leu, Met, Asn, Pro, Gln, Arg, Ser, Thr, Val or Tyr
CXXXXCXXXXXCXXXXXXXXXCXCXXXXXXXXXXXC

SEQ ID NO: 302 - protein, 37 aa, Artificial Sequence
  EGF domain monomer sequence
  MOD_RES (2)...(2): Xaa = Ala, Asp, Glu, Phe, Gly, His, Ile, Lys, Leu, Asn, Pro, Gln, Arg, Ser, Thr, Val or Trp
  MOD_RES (3)...(3): Xaa = Ala, Asp, Glu, Gly, His, Lys, Leu, Met, Asn, Pro, Arg, Ser, Thr or Tyr
  MOD_RES (4)...(4): Xaa = Ala, Asp, Glu, Gly, His, Lys, Leu, Met, Asn, Pro, Gln, Arg, Ser, Thr, Val or Trp
  MOD_RES (5)...(5): Xaa = Ala, Glu, Gly, Met, Asn, Pro, Gln, Arg, Ser, Thr or Tyr
  MOD_RES (7)...(7): Xaa = Ala, Cys, Asp, Glu, Phe, Gly, His, Lys, Leu, Met, Asn, Pro, Gln, Arg, Ser, Val or Tyr
  MOD_RES (8)...(8): Xaa = Ala, Asp, Glu, Gly, His, Ile, Lys, Leu, Met, Asn, Pro, Gln, Arg, Ser, Thr, Val or Tyr
  MOD_RES (9)...(9): Xaa = Ala, Asp, Glu, Phe, Gly, His, Lys, Leu, Asn, Gln, Arg, Ser, Thr or Tyr
  MOD_RES (10)...(10): Xaa = Ala, Phe, Gly, His, Gln, Ser, Thr or Val
  MOD_RES (11)...(11): Xaa = Ala, Asp, Glu, Phe, His, Ile, Lys, Leu, Met, Asn, Gln, Arg, Ser, Thr or Val
  MOD_RES (13)...(13): Xaa = Ala, Asp, Phe, His, Ile, Lys, Leu, Met, Asn, Gln, Arg, Ser, Thr, Val or Tyr
  MOD_RES (14)...(14): Xaa = Ala, Asp, Glu, Phe, His, Leu, Met, Asn, Pro, Gln, Arg, Ser, Val or Tyr
  MOD_RES (15)...(15): Xaa = Ala, Asp, Glu, Phe, Gly, His, Leu, Asn, Arg, Ser, Thr, Val or Tyr
  MOD_RES (16)...(16): Xaa = Ala, Asp, Glu, Gly, Asn, Pro, Gln, Arg, Ser or Thr
  MOD_RES (17)...(17): Xaa = Ala, Asp, Glu, Phe, Gly, Lys, Leu, Asn, Pro, Gln, Arg, Ser or Thr
  MOD_RES (18)...(18): Xaa = Ala, Asp, Glu, Gly, Met, Asn, Arg, Ser, Thr, Val or Tyr
  MOD_RES (19)...(19): Xaa = Ala, Asp, Glu, Gly, Lys, Leu, Met, Gln, Arg, Ser or Thr
  MOD_RES (20)...(20): Xaa = Phe, His, Ile, Pro, Arg, Val, Trp or Tyr
  MOD_RES (21)...(21): Xaa = Ala, Glu, His, Lys, Leu, Gln, Ser, Thr, Val or Tyr
  MOD_RES (23)...(23): Xaa = Ala, Asp, Glu, Phe, Gly, His, Ile, Lys, Leu, Met, Asn, Pro, Gln, Arg, Ser, Thr, Val, Trp or Tyr
  MOD_RES (25)...(25): Xaa = Ala, Asp, Glu, Phe, Gly, His, Ile, Lys, Leu, Asn, Pro, Gln, Arg, Ser, Thr, Val or Tyr
  MOD_RES (26)...(26): Xaa = Ala, Asp, Glu, Phe, His, Ile, Lys, Leu, Met, Asn, Pro, Gln, Arg, Ser, Thr or Val
  MOD_RES (27)...(27): Xaa = Asp, Glu, Gly, Asn, Pro or Ser
  MOD_RES (28)...(28): Xaa = Ala, Asp, Glu, Phe, His, Leu, Met, Gln, Arg, Ser, Thr, Trp or Tyr
  MOD_RES (29)...(29): Xaa = Ala, Asp, Glu, Phe, Gly, His, Ile, Lys, Leu, Met, Asn, Gln, Arg, Ser, Thr, Val or Tyr
  MOD_RES (30)...(30): Xaa = Ala, Phe, Gly, Ile, Lys, Leu, Met, Pro, Gln, Arg, Ser, Thr, Val, Trp or Tyr
  MOD_RES (31)...(31): Xaa = Ala, Asp, Glu, Phe, Gly, His, Lys, Leu, Met, Asn, Pro, Gln, Arg, Ser, Thr, Val or Trp
  MOD_RES (32)...(32): Xaa = Ala, Asp, Glu, Gly, Ile, Lys, Leu, Met, Asn, Pro, Gln, Arg, Ser, Thr, Val or Tyr
  MOD_RES (33)...(33): Xaa = Ala, Asp, Glu, Phe, Gly, His, Ile, Lys, Leu, Met, Asn, Gln, Ser, Thr or Val
  MOD_RES (34)...(34): Xaa = Glu, Phe, Gly, His, Ile, Lys, Leu, Met, Asn, Pro, Gln, Arg, Ser, Thr or Trp
  MOD_RES (35)...(35): Xaa = Ala, Asp, Glu, Phe, Gly, His, Lys, Leu, Met, Asn, Pro, Gln, Arg, Ser, Thr, Val or Tyr
  MOD_RES (36)...(36): Xaa = Ala, Asp, Glu, Phe, Gly, His, Ile, Lys, Met, Asn, Gln, Arg, Ser, Thr, Val or Tyr
CXXXXCXXXXXCXXXXXXXXXCXCXXXXXXXXXXXXC

SEQ ID NO: 303 - protein, 33 aa, Artificial Sequence
  EGF domain monomer sequence
  MOD_RES (2)...(2): Xaa = Ala, Asp, Glu, Gly, Ile, Lys, Leu, Gln, Arg, Ser, Thr or Val
  MOD_RES (3)...(3): Xaa = Ala, Asp, Glu, Phe, Gly, His, Ile, Lys, Leu, Met, Asn, Pro, Gln, Arg, Ser, Thr or Val
  MOD_RES (4)...(4): Xaa = Ala, Glu, Phe, Gly, His, Leu, Asn, Pro, Gln, Arg, Ser, Thr, Trp or Tyr
  MOD_RES (5)...(5): Xaa = Ala, Asp, Glu, Phe, Gly, His, Ile, Lys, Leu, Asn, Pro, Arg, Ser or Thr
  MOD_RES (6)...(6): Xaa = Ala, Phe, Gly, Ile, Lys, Leu, Met, Asn, Pro, Gln, Arg, Ser, Thr, Val or Tyr
  MOD_RES (8)...(8): Xaa = Ala, Asp, Glu, Phe, Gly, His, Ile, Lys, Leu, Met, Asn, Pro, Gln, Arg, Ser, Thr or Val
  MOD_RES (9)...(9): Xaa = Ala, Asp, Glu, Phe, Gly, His, Lys, Leu, Asn, Pro, Gln, Arg, Ser, Thr or Tyr
  MOD_RES (10)...(10): Xaa = Ala, Gly or Thr
  MOD_RES (11)...(11): Xaa = Ala, Asp, Glu, Phe, His, Ile, Lys, Leu, Met, Asn, Gln, Arg, Ser, Thr or Val
  MOD_RES (13)...(13): Xaa = Ala, Asp, Phe, His, Ile, Lys, Leu, Met, Asn, Gln, Arg, Ser, Thr, Val or Tyr
  MOD_RES (14)...(14): Xaa = Ala, Asp, Glu, Phe, His, Leu, Met, Asn, Pro, Gln, Arg, Ser, Val or Tyr
  MOD_RES (15)...(15): Xaa = Ala, Asp, Glu, Phe, Gly, His, Leu, Asn, Arg, Ser, Thr, Val or Tyr
  MOD_RES (16)...(16): Xaa = Ala, Asp, Glu, Gly, Asn, Pro, Gln, Arg, Ser or Thr
  MOD_RES (17)...(17): Xaa = Ala, Asp, Glu, Phe, Gly, Lys, Leu, Asn, Pro, Gln, Arg, Ser or Thr
  MOD_RES (18)...(18): Xaa = Ala, Asp, Glu, Gly, Met, Asn, Arg, Ser, Thr, Val or Tyr
  MOD_RES (19)...(19): Xaa = Ala, Asp, Glu, Gly, Lys, Leu, Met, Gln, Arg, Ser or Thr
  MOD_RES (20)...(20): Xaa = Phe, His, Ile, Pro, Arg, Val, Trp or Tyr
  MOD_RES (21)...(21): Xaa = Ala, Glu, His, Lys, Leu, Gln, Ser, Thr, Val or Tyr
  MOD_RES (23)...(23): Xaa = Ala, Asp, Glu, Phe, Gly, His, Ile, Lys, Leu, Met, Asn, Pro, Gln, Arg, Ser, Thr, Val, Trp or Tyr
  MOD_RES (25)...(25): Xaa = Ala, Asp, Glu, Phe, His, Lys, Leu, Met, Asn, Pro, Gln, Arg, Ser, Thr, Val, Trp or Tyr
  MOD_RES (26)...(26): Xaa = Ala, Asp, Glu, Phe, Gly, His, Lys, Leu, Asn, Pro, Gln, Arg, Ser, Thr, Val or Tyr
  MOD_RES (27)...(27): Xaa = Ala, Glu, Gly, His, Lys, Leu, Asn, Pro, Arg, Ser, Thr or Tyr
  MOD_RES (28)...(28): Xaa = Phe, His, Ile, Leu, Met, Arg, Thr, Trp or Tyr
  MOD_RES (29)...(29): Xaa = Ala, Asp, Glu, Phe, Gly, His, Ile, Lys, Leu, Met, Asn, Gln, Arg, Ser, Thr, Val or Tyr
  MOD_RES (30)...(30): Xaa = Asp, Gly or Ser
  MOD_RES (31)...(31): Xaa = Ala, Asp, Glu, Phe, His, Ile, Lys, Leu, Asn, Pro, Gln, Arg, Ser, Thr, Val or Tyr
  MOD_RES (32)...(32): Xaa = Ala, Asp, Glu, Phe, His, Ile, Lys, Leu, Met, Asn, Gln, Arg, Ser, Thr or Tyr
CXXXXXCXXXXCXXXXXXXXXCXCXXXXXXXXC

SEQ ID NO: 304 - protein, 34 aa, Artificial Sequence
  EGF domain monomer sequence
  MOD_RES (2)...(2): Xaa = Ala, Asp, Glu, Gly, Ile, Lys, Leu, Gln, Arg, Ser, Thr or Val
  MOD_RES (3)...(3): Xaa = Ala, Asp, Glu, Phe, Gly, His, Ile, Lys, Leu, Met, Asn, Pro, Gln, Arg, Ser, Thr or Val
  MOD_RES (4)...(4): Xaa = Ala, Glu, Phe, Gly, His, Leu, Asn, Pro, Gln, Arg, Ser, Thr, Trp or Tyr
  MOD_RES (5)...(5): Xaa = Ala, Asp, Glu, Phe, Gly, His, Ile, Lys, Leu, Asn, Pro, Arg, Ser or Thr
  MOD_RES (6)...(6): Xaa = Ala, Phe, Gly, Ile, Lys, Leu, Met, Asn, Pro, Gln, Arg, Ser, Thr, Val or Tyr
  MOD_RES (8)...(8): Xaa = Ala, Asp, Glu, Phe, Gly, His, Ile, Lys, Leu, Met, Asn, Pro, Gln, Arg, Ser, Thr or Val
  MOD_RES (9)...(9): Xaa = Ala, Asp, Glu, Phe, Gly, His, Lys, Leu, Asn, Pro, Gln, Arg, Ser, Thr or Tyr
  MOD_RES (10)...(10): Xaa = Ala, Gly or Thr
  MOD_RES (11)...(11): Xaa = Ala, Asp, Glu, Phe, His, Ile, Lys, Leu, Met, Asn, Gln, Arg, Ser, Thr or Val
  MOD_RES (13)...(13): Xaa = Ala, Asp, Phe, His, Ile, Lys, Leu, Met, Asn, Gln, Arg, Ser, Thr, Val or Tyr
  MOD_RES (14)...(14): Xaa = Ala, Asp, Glu, Phe, His, Leu, Met, Asn, Pro, Gln, Arg, Ser, Val or Tyr
  MOD_RES (15)...(15): Xaa = Ala, Asp, Glu, Phe, Gly, His, Leu, Asn, Arg, Ser, Thr, Val or Tyr
  MOD_RES (16)...(16): Xaa = Ala, Asp, Glu, Gly, Asn, Pro, Gln, Arg, Ser or Thr
  MOD_RES (17)...(17): Xaa = Ala, Asp, Glu, Phe, Gly, Lys, Leu, Asn, Pro, Gln, Arg, Ser or Thr
  MOD_RES (18)...(18): Xaa = Ala, Asp, Glu, Gly, Met, Asn, Arg, Ser, Thr, Val or Tyr
  MOD_RES (19)...(19): Xaa = Ala, Asp, Glu, Gly, Lys, Leu, Met, Gln, Arg, Ser or Thr
  MOD_RES (20)...(20): Xaa = Phe, His, Ile, Pro, Arg, Val, Trp or Tyr
  MOD_RES (21)...(21): Xaa = Ala, Glu, His, Lys, Leu, Gln, Ser, Thr, Val or Tyr
  MOD_RES (23)...(23): Xaa = Ala, Asp, Glu, Phe, Gly, His, Ile, Lys, Leu, Met, Asn, Pro, Gln, Arg, Ser, Thr, Val, Trp or Tyr
  MOD_RES (25)...(25): Xaa = Ala, Asp, Glu, Phe, Gly, His, Ile, Lys, Leu, Asn, Pro, Gln, Arg, Ser, Thr, Val or Tyr
  MOD_RES (26)...(26): Xaa = Ala, Asp, Glu, Phe, His, Ile, Lys, Leu, Met, Asn, Pro, Gln, Arg, Ser, Thr or Val
  MOD_RES (27)...(27): Xaa = Asp, Glu, Gly, Asn, Pro or Ser
  MOD_RES (28)...(28): Xaa = Ala, Asp, Glu, Phe, His, Leu, Met, Gln, Arg, Ser, Thr, Trp or Tyr
  MOD_RES (29)...(29): Xaa = Ala, Asp, Glu, Phe, Gly, His, Ile, Lys, Leu, Met, Asn, Gln, Arg, Ser, Thr, Val or Tyr
  MOD_RES (30)...(30): Xaa = Ala, Phe, Gly, Ile, Lys, Leu, Met, Pro, Gln, Arg, Ser, Thr, Val, Trp or Tyr
  MOD_RES (31)...(31): Xaa = Ala, Asp, Glu, Phe, Gly, His, Lys, Leu, Met, Asn, Pro, Gln, Arg, Ser, Thr, Val or Trp
  MOD_RES (32)...(32): Xaa = Ala, Asp, Glu, Gly, Ile, Lys, Leu, Met, Asn, Pro, Gln, Arg, Ser, Thr, Val or Tyr
  MOD_RES (33)...(33): Xaa = Ala, Asp, Glu, Phe, Gly, His, Ile, Lys, Leu, Met, Asn, Gln, Ser, Thr or Val
CXXXXXCXXXXCXXXXXXXXXCXCXXXXXXXXXC

SEQ ID NO: 305 - protein, 35 aa, Artificial Sequence
  EGF domain monomer sequence
  MOD_RES (2)...(2): Xaa = Ala, Asp, Glu, Gly, Ile, Lys, Leu, Gln, Arg, Ser, Thr or Val
  MOD_RES (3)...(3): Xaa = Ala, Asp, Glu, Phe, Gly, His, Ile, Lys, Leu, Met, Asn, Pro, Gln, Arg, Ser, Thr or Val
  MOD_RES (4)...(4): Xaa = Ala, Glu, Phe, Gly, His, Leu, Asn, Pro, Gln, Arg, Ser, Thr, Trp or Tyr
  MOD_RES (5)...(5): Xaa = Ala, Asp, Glu, Phe, Gly, His, Ile, Lys, Leu, Asn, Pro, Arg, Ser or Thr
  MOD_RES (6)...(6): Xaa = Ala, Phe, Gly, Ile, Lys, Leu, Met, Asn, Pro, Gln, Arg, Ser, Thr, Val or Tyr
  MOD_RES (8)...(8): Xaa = Ala, Asp, Glu, Phe, Gly, His, Ile, Lys, Leu, Met, Asn, Pro, Gln, Arg, Ser, Thr or Val
  MOD_RES (9)...(9): Xaa = Ala, Asp, Glu, Phe, Gly, His, Lys, Leu, Asn, Pro, Gln, Arg, Ser, Thr or Tyr
  MOD_RES (10)...(10): Xaa = Ala, Gly or Thr
  MOD_RES (11)...(11): Xaa = Ala, Asp, Glu, Phe, His, Ile, Lys, Leu, Met, Asn, Gln, Arg, Ser, Thr or Val
  MOD_RES (13)...(13): Xaa = Ala, Asp, Phe, His, Ile, Lys, Leu, Met, Asn, Gln, Arg, Ser, Thr, Val or Tyr
  MOD_RES (14)...(14): Xaa = Ala, Asp, Glu, Phe, His, Leu, Met, Asn, Pro, Gln, Arg, Ser, Val or Tyr
  MOD_RES (15)...(15): Xaa = Ala, Asp, Glu, Phe, Gly, His, Leu, Asn, Arg, Ser, Thr, Val or Tyr
  MOD_RES (16)...(16): Xaa = Ala, Asp, Glu, Gly, Asn, Pro, Gln, Arg, Ser or Thr
  MOD_RES (17)...(17): Xaa = Ala, Asp, Glu, Phe, Gly, Lys, Leu, Asn, Pro, Gln, Arg, Ser or Thr
  MOD_RES (18)...(18): Xaa = Ala, Asp, Glu, Gly, Met, Asn, Arg, Ser, Thr, Val or Tyr
  MOD_RES (19)...(19): Xaa = Ala, Asp, Glu, Gly, Lys, Leu, Met, Gln, Arg, Ser or Thr
  MOD_RES (20)...(20): Xaa = Phe, His, Ile, Pro, Arg, Val, Trp or Tyr
  MOD_RES (21)...(21): Xaa = Ala, Glu, His, Lys, Leu, Gln, Ser, Thr, Val or Tyr
  MOD_RES (23)...(23): Xaa = Ala, Asp, Glu, Phe, Gly, His, Ile, Lys, Leu, Met, Asn, Pro, Gln, Arg, Ser, Thr, Val, Trp or Tyr
  MOD_RES (25)...(25): Xaa = Ala, Asp, Glu, Phe, Gly, His, Ile, Lys, Leu, Asn, Pro, Gln, Arg, Ser, Thr, Val or Tyr
  MOD_RES (26)...(26): Xaa = Ala, Asp, Glu, Phe, His, Ile, Lys, Leu, Met, Asn, Pro, Gln, Arg, Ser, Thr or Val
  MOD_RES (27)...(27): Xaa = Asp, Glu, Gly, Asn, Pro or Ser
  MOD_RES (28)...(28): Xaa = Ala, Asp, Glu, Phe, His, Leu, Met, Gln, Arg, Ser, Thr, Trp or Tyr
  MOD_RES (29)...(29): Xaa = Ala, Asp, Glu, Phe, Gly, His, Ile, Lys, Leu, Met, Asn, Gln, Arg, Ser, Thr, Val or Tyr
  MOD_RES (30)...(30): Xaa = Ala, Phe, Gly, Ile, Lys, Leu, Met, Pro, Gln, Arg, Ser, Thr, Val, Trp or Tyr
  MOD_RES (31)...(31): Xaa = Ala, Asp, Glu, Phe, Gly, His, Lys, Leu, Met, Asn, Pro, Gln, Arg, Ser, Thr, Val or Trp
  MOD_RES (32)...(32): Xaa = Ala, Asp, Glu, Gly, Ile, Lys, Leu, Met, Asn, Pro, Gln, Arg, Ser, Thr, Val or Tyr
  MOD_RES (33)...(33): Xaa = Ala, Asp, Glu, Phe, Gly, His, Ile, Lys, Leu, Met, Asn, Gln, Ser, Thr or Val
  MOD_RES (34)...(34): Xaa = Glu, Phe, Gly, His, Ile, Lys, Leu, Met, Asn, Pro, Gln, Arg, Ser, Thr or Trp
CXXXXXCXXXXCXXXXXXXXXCXCXXXXXXXXXXC

SEQ ID NO: 306 - protein, 36 aa, Artificial Sequence
  EGF domain monomer sequence
  MOD_RES (2)...(2): Xaa = Ala, Asp, Glu, Gly, Ile, Lys, Leu, Gln, Arg, Ser, Thr or Val
  MOD_RES (3)...(3): Xaa = Ala, Asp, Glu, Phe, Gly, His, Ile, Lys, Leu, Met, Asn, Pro, Gln, Arg, Ser, Thr or Val
  MOD_RES (4)...(4): Xaa = Ala, Glu, Phe, Gly, His, Leu, Asn, Pro, Gln, Arg, Ser, Thr, Trp or Tyr
  MOD_RES (5)...(5): Xaa = Ala, Asp, Glu, Phe, Gly, His, Ile, Lys, Leu, Asn, Pro, Arg, Ser or Thr
  MOD_RES (6)...(6): Xaa = Ala, Phe, Gly, Ile, Lys, Leu, Met, Asn, Pro, Gln, Arg, Ser, Thr, Val or Tyr
  MOD_RES (8)...(8): Xaa = Ala, Asp, Glu, Phe, Gly, His, Ile, Lys, Leu, Met, Asn, Pro, Gln, Arg, Ser, Thr or Val
  MOD_RES (9)...(9): Xaa = Ala, Asp, Glu, Phe, Gly, His, Lys, Leu, Asn, Pro, Gln, Arg, Ser, Thr or Tyr
  MOD_RES (10)...(10): Xaa = Ala, Gly or Thr
  MOD_RES (11)...(11): Xaa = Ala, Asp, Glu, Phe, His, Ile, Lys, Leu, Met, Asn, Gln, Arg, Ser, Thr or Val
  MOD_RES (13)...(13): Xaa = Ala, Asp, Phe, His, Ile, Lys, Leu, Met, Asn, Gln, Arg, Ser, Thr, Val or Tyr
  MOD_RES (14)...(14): Xaa = Ala, Asp, Glu, Phe, His, Leu, Met, Asn, Pro, Gln, Arg, Ser, Val or Tyr
  MOD_RES (15)...(15): Xaa = Ala, Asp, Glu, Phe, Gly, His, Leu, Asn, Arg, Ser, Thr, Val or Tyr
  MOD_RES (16)...(16): Xaa = Ala, Asp, Glu, Gly, Asn, Pro, Gln, Arg, Ser or Thr
  MOD_RES (17)...(17): Xaa = Ala, Asp, Glu, Phe, Gly, Lys, Leu, Asn, Pro, Gln, Arg, Ser or Thr
  MOD_RES (18)...(18): Xaa = Ala, Asp, Glu, Gly, Met, Asn, Arg, Ser, Thr, Val or Tyr
  MOD_RES (19)...(19): Xaa = Ala, Asp, Glu, Gly, Lys, Leu, Met, Gln, Arg, Ser or Thr
  MOD_RES (20)...(20): Xaa = Phe, His, Ile, Pro, Arg, Val, Trp or Tyr
  MOD_RES (21)...(21): Xaa = Ala, Glu, His, Lys, Leu, Gln, Ser, Thr, Val or Tyr
  MOD_RES (23)...(23): Xaa = Ala, Asp, Glu, Phe, Gly, His, Ile, Lys, Leu, Met, Asn, Pro, Gln, Arg, Ser, Thr, Val, Trp or Tyr
  MOD_RES (25)...(25): Xaa = Ala, Asp, Glu, Phe, Gly, His, Ile, Lys, Leu, Asn, Pro, Gln, Arg, Ser, Thr, Val or Tyr
  MOD_RES (26)...(26): Xaa = Ala, Asp, Glu, Phe, His, Ile, Lys, Leu, Met, Asn, Pro, Gln, Arg, Ser, Thr or Val
  MOD_RES (27)...(27): Xaa = Asp, Glu, Gly, Asn, Pro or Ser
  MOD_RES (28)...(28): Xaa = Ala, Asp, Glu, Phe, His, Leu, Met, Gln, Arg, Ser, Thr, Trp or Tyr
  MOD_RES (29)...(29): Xaa = Ala, Asp, Glu, Phe, Gly, His, Ile, Lys, Leu, Met, Asn, Gln, Arg, Ser, Thr, Val or Tyr
  MOD_RES (30)...(30): Xaa = Ala, Phe, Gly, Ile, Lys, Leu, Met, Pro, Gln, Arg, Ser, Thr, Val, Trp or Tyr
  MOD_RES (31)...(31): Xaa = Ala, Asp, Glu, Phe, Gly, His, Lys, Leu, Met, Asn, Pro, Gln, Arg, Ser, Thr, Val or Trp
  MOD_RES (32)...(32): Xaa = Ala, Asp, Glu, Gly, Ile, Lys, Leu, Met, Asn, Pro, Gln, Arg, Ser, Thr, Val or Tyr
  MOD_RES (33)...(33): Xaa = Ala, Asp, Glu, Phe, Gly, His, Ile, Lys, Leu, Met, Asn, Gln, Ser, Thr or Val
  MOD_RES (34)...(34): Xaa = Glu, Phe, Gly, His, Ile, Lys, Leu, Met, Asn, Pro, Gln, Arg, Ser, Thr or Trp
  MOD_RES (35)...(35): Xaa = Ala, Asp, Glu, Phe, Gly, His, Lys, Leu, Met, Asn, Pro, Gln, Arg, Ser, Thr, Val or Tyr
CXXXXXCXXXXCXXXXXXXXXCXCXXXXXXXXXXXC

SEQ ID NO: 307 - protein, 37 aa, Artificial Sequence
  EGF domain monomer sequence
  MOD_RES (2)...(2): Xaa = Ala, Asp, Glu, Gly, Ile, Lys, Leu, Gln, Arg, Ser, Thr or Val
  MOD_RES (3)...(3): Xaa = Ala, Asp, Glu, Phe, Gly, His, Ile, Lys, Leu, Met, Asn, Pro, Gln, Arg, Ser, Thr or Val
  MOD_RES (4)...(4): Xaa = Ala, Glu, Phe, Gly, His, Leu, Asn, Pro, Gln, Arg, Ser, Thr, Trp or Tyr
  MOD_RES (5)...(5): Xaa = Ala, Asp, Glu, Phe, Gly, His, Ile, Lys, Leu, Asn, Pro, Arg, Ser or Thr
  MOD_RES (6)...(6): Xaa = Ala, Phe, Gly, Ile, Lys, Leu, Met, Asn, Pro, Gln, Arg, Ser, Thr, Val or Tyr
  MOD_RES (8)...(8): Xaa = Ala, Asp, Glu, Phe, Gly, His, Ile, Lys, Leu, Met, Asn, Pro, Gln, Arg, Ser, Thr or Val
  MOD_RES (9)...(9): Xaa = Ala, Asp, Glu, Phe, Gly, His, Lys, Leu, Asn, Pro, Gln, Arg, Ser, Thr or Tyr
  MOD_RES (10)...(10): Xaa = Ala, Gly or Thr
  MOD_RES (11)...(11): Xaa = Ala, Asp, Glu, Phe, His, Ile, Lys, Leu, Met, Asn, Gln, Arg, Ser, Thr or Val
  MOD_RES (13)...(13): Xaa = Ala, Asp, Phe, His, Ile, Lys, Leu, Met, Asn, Gln, Arg, Ser, Thr, Val or Tyr
  MOD_RES (14)...(14): Xaa = Ala, Asp, Glu, Phe, His, Leu, Met, Asn, Pro, Gln, Arg, Ser, Val or Tyr
  MOD_RES (15)...(15): Xaa = Ala, Asp, Glu, Phe, Gly, His, Leu, Asn, Arg, Ser, Thr, Val or Tyr
  MOD_RES (16)...(16): Xaa = Ala, Asp, Glu, Gly, Asn, Pro, Gln, Arg, Ser or Thr
  MOD_RES (17)...(17): Xaa = Ala, Asp, Glu, Phe, Gly, Lys, Leu, Asn, Pro, Gln, Arg, Ser or Thr
  MOD_RES (18)...(18): Xaa = Ala, Asp, Glu, Gly, Met, Asn, Arg, Ser, Thr, Val or Tyr
  MOD_RES (19)...(19): Xaa = Ala, Asp, Glu, Gly, Lys, Leu, Met, Gln, Arg, Ser or Thr
  MOD_RES (20)...(20): Xaa = Phe, His, Ile, Pro, Arg, Val, Trp or Tyr
  MOD_RES (21)...(21): Xaa = Ala, Glu, His, Lys, Leu, Gln, Ser, Thr, Val or Tyr
  MOD_RES (23)...(23): Xaa = Ala, Asp, Glu, Phe, Gly, His, Ile, Lys, Leu, Met, Asn, Pro, Gln, Arg, Ser, Thr, Val, Trp or Tyr
  MOD_RES (25)...(25): Xaa = Ala, Asp, Glu, Phe, Gly, His, Ile, Lys, Leu, Asn, Pro, Gln, Arg, Ser, Thr, Val or Tyr
  MOD_RES (26)...(26): Xaa = Ala, Asp, Glu, Phe, His, Ile, Lys, Leu, Met, Asn, Pro, Gln, Arg, Ser, Thr or Val
  MOD_RES (27)...(27): Xaa = Asp, Glu, Gly, Asn, Pro or Ser
  MOD_RES (28)...(28): Xaa = Ala, Asp, Glu, Phe, His, Leu, Met, Gln, Arg, Ser, Thr, Trp or Tyr
  MOD_RES (29)...(29): Xaa = Ala, Asp, Glu, Phe, Gly, His, Ile, Lys, Leu, Met, Asn, Gln, Arg, Ser, Thr, Val or Tyr
  MOD_RES (30)...(30): Xaa = Ala, Phe, Gly, Ile, Lys, Leu, Met, Pro, Gln, Arg, Ser, Thr, Val, Trp or Tyr
  MOD_RES (31)...(31): Xaa = Ala, Asp, Glu, Phe, Gly, His, Lys, Leu, Met, Asn, Pro, Gln, Arg, Ser, Thr, Val or Trp
  MOD_RES (32)...(32): Xaa = Ala, Asp, Glu, Gly, Ile, Lys, Leu, Met, Asn, Pro, Gln, Arg, Ser, Thr, Val or Tyr
  MOD_RES (33)...(33): Xaa = Ala, Asp, Glu, Phe, Gly, His, Ile, Lys, Leu, Met, Asn, Gln, Ser, Thr or Val
  MOD_RES (34)...(34): Xaa = Glu, Phe, Gly, His, Ile, Lys, Leu, Met, Asn, Pro, Gln, Arg, Ser, Thr or Trp
  MOD_RES (35)...(35): Xaa = Ala, Asp, Glu, Phe, Gly, His, Lys, Leu, Met, Asn, Pro, Gln, Arg, Ser, Thr, Val or Tyr
  MOD_RES (36)...(36): Xaa = Ala, Asp, Glu, Phe, Gly, His, Ile, Lys, Met, Asn, Gln, Arg, Ser, Thr, Val or Tyr
CXXXXXCXXXXCXXXXXXXXXCXCXXXXXXXXXXXXC

SEQ ID NO: 308 - protein, 34 aa, Artificial Sequence
  EGF domain monomer sequence
  MOD_RES (2)...(2): Xaa = Ala, Asp, Glu, Phe, Gly, Ile, Lys, Leu, Met, Asn, Pro, Gln, Arg, Ser, Thr, Val or Tyr
  MOD_RES (3)...(3): Xaa = Ala, Asp, Glu, Phe, Gly, His, Ile, Lys, Leu, Met, Asn, Pro, Gln, Arg, Ser, Thr, Val or Tyr
  MOD_RES (4)...(4): Xaa = Ala, Asp, Glu, Phe, Gly, His, Ile, Lys, Leu, Met, Asn, Pro, Gln, Arg, Ser, Thr, Val or Trp
  MOD_RES (5)...(5): Xaa = Ala, Asp, Glu, Phe, Gly, His, Ile, Lys, Leu, Met, Asn, Pro, Gln, Arg, Ser, Thr or Val
  MOD_RES (6)...(6): Xaa = Ala, Asp, Glu, Phe, Gly, His, Ile, Lys, Leu, Asn, Pro, Gln, Arg, Ser, Val or Tyr
  MOD_RES (7)...(7): Xaa = Ala, Asp, Glu, Gly, Ile, Lys, Leu, Met, Asn, Pro, Gln, Arg, Ser, Thr, Val or Tyr
  MOD_RES (9)...(9): Xaa = Ala, Asp, Glu, Phe, Gly, His, Ile, Lys, Leu, Met, Asn, Pro, Gln, Arg, Ser, Thr or Val
  MOD_RES (10)...(10): Xaa = Ala, Asp, Glu, Phe, Gly, His, Lys, Leu, Asn, Pro, Gln, Arg, Ser, Thr or Tyr
  MOD_RES (11)...(11): Xaa = Ala, Gly or Thr
  MOD_RES (12)...(12): Xaa = Ala, Asp, Glu, Phe, His, Ile, Lys, Leu, Met, Asn, Gln, Arg, Ser, Thr or Val
  MOD_RES (14)...(14): Xaa = Ala, Asp, Phe, His, Ile, Lys, Leu, Met, Asn, Gln, Arg, Ser, Thr, Val or Tyr
  MOD_RES (15)...(15): Xaa = Ala, Asp, Glu, Phe, His, Leu, Met, Asn, Pro, Gln, Arg, Ser, Val or Tyr
  MOD_RES (16)...(16): Xaa = Ala, Asp, Glu, Phe, Gly, His, Leu, Asn, Arg, Ser, Thr, Val or Tyr
  MOD_RES (17)...(17): Xaa = Ala, Asp, Glu, Gly, Asn, Pro, Gln, Arg, Ser or Thr
  MOD_RES (18)...(18): Xaa = Ala, Asp, Glu, Phe, Gly, Lys, Leu, Asn, Pro, Gln, Arg, Ser or Thr
  MOD_RES (19)...(19): Xaa = Ala, Asp, Glu, Gly, Met, Asn, Arg, Ser, Thr, Val or Tyr
  MOD_RES (20)...(20): Xaa = Ala, Asp, Glu, Gly, Lys, Leu, Met, Gln, Arg, Ser or Thr
  MOD_RES (21)...(21): Xaa = Phe, His, Ile, Pro, Arg, Val, Trp or Tyr
  MOD_RES (22)...(22): Xaa = Ala, Glu, His, Lys, Leu, Gln, Ser, Thr, Val or Tyr
  MOD_RES (24)...(24): Xaa = Ala, Asp, Glu, Phe, Gly, His, Ile, Lys, Leu, Met, Asn, Pro, Gln, Arg, Ser, Thr, Val, Trp or Tyr
  MOD_RES (26)...(26): Xaa = Ala, Asp, Glu, Phe, His, Lys, Leu, Met, Asn, Pro, Gln, Arg, Ser, Thr, Val, Trp or Tyr
  MOD_RES (27)...(27): Xaa = Ala, Asp, Glu, Phe, Gly, His, Lys, Leu, Asn, Pro, Gln, Arg, Ser, Thr, Val or Tyr
  MOD_RES (28)...(28): Xaa = Ala, Glu, Gly, His, Lys, Leu, Asn, Pro, Arg, Ser, Thr or Tyr
  MOD_RES (29)...(29): Xaa = Phe, His, Ile, Leu, Met, Arg, Thr, Trp or Tyr
  MOD_RES (30)...(30): Xaa = Ala, Asp, Glu, Phe, Gly, His, Ile, Lys, Leu, Met, Asn, Gln, Arg, Ser, Thr, Val or Tyr
  MOD_RES (31)...(31): Xaa = Asp, Gly or Ser
  MOD_RES (32)...(32): Xaa = Ala, Asp, Glu, Phe, His, Ile, Lys, Leu, Asn, Pro, Gln, Arg, Ser, Thr, Val or Tyr
  MOD_RES (33)...(33): Xaa = Ala, Asp, Glu, Phe, His, Ile, Lys, Leu, Met, Asn, Gln, Arg, Ser, Thr or Tyr
CXXXXXXCXXXXCXXXXXXXXXCXCXXXXXXXXC

SEQ ID NO: 309 - protein, 35 aa, Artificial Sequence
  EGF domain monomer sequence
  MOD_RES (2)...(2): Xaa = Ala, Asp, Glu, Phe, Gly, Ile, Lys, Leu, Met, Asn, Pro, Gln, Arg, Ser, Thr, Val or Tyr
  MOD_RES (3)...(3): Xaa = Ala, Asp, Glu, Phe, Gly, His, Ile, Lys, Leu, Met, Asn, Pro, Gln, Arg, Ser, Thr, Val or Tyr
  MOD_RES (4)...(4): Xaa = Ala, Asp, Glu, Phe, Gly, His, Ile, Lys, Leu, Met, Asn, Pro, Gln, Arg, Ser, Thr, Val or Trp
  MOD_RES (5)...(5): Xaa = Ala, Asp, Glu, Phe, Gly, His, Ile, Lys, Leu, Met, Asn, Pro, Gln, Arg, Ser, Thr or Val
  MOD_RES (6)...(6): Xaa = Ala, Asp, Glu, Phe, Gly, His, Ile, Lys, Leu, Asn, Pro, Gln, Arg, Ser, Val or Tyr
  MOD_RES (7)...(7): Xaa = Ala, Asp, Glu, Gly, Ile, Lys, Leu, Met, Asn, Pro, Gln, Arg, Ser, Thr, Val or Tyr
  MOD_RES (9)...(9): Xaa = Ala, Asp, Glu, Phe, Gly, His, Ile, Lys, Leu, Met, Asn, Pro, Gln, Arg, Ser, Thr or Val
  MOD_RES (10)...(10): Xaa = Ala, Asp, Glu, Phe, Gly, His, Lys, Leu, Asn, Pro, Gln, Arg, Ser, Thr or Tyr
  MOD_RES (11)...(11): Xaa = Ala, Gly or Thr
  MOD_RES (12)...(12): Xaa = Ala, Asp, Glu, Phe, His, Ile, Lys, Leu, Met, Asn, Gln, Arg, Ser, Thr or Val
  MOD_RES (14)...(14): Xaa = Ala, Asp, Phe, His, Ile, Lys, Leu, Met, Asn, Gln, Arg, Ser, Thr, Val or Tyr
  MOD_RES (15)...(15): Xaa = Ala, Asp, Glu, Phe, His, Leu, Met, Asn, Pro, Gln, Arg, Ser, Val or Tyr
  MOD_RES (16)...(16): Xaa = Ala, Asp, Glu, Phe, Gly, His, Leu, Asn, Arg, Ser, Thr, Val or Tyr
  MOD_RES (17)...(17): Xaa = Ala, Asp, Glu, Gly, Asn, Pro, Gln, Arg, Ser or Thr
  MOD_RES (18)...(18): Xaa = Ala, Asp, Glu, Phe, Gly, Lys, Leu, Asn, Pro, Gln, Arg, Ser or Thr
  MOD_RES (19)...(19): Xaa = Ala, Asp, Glu, Gly, Met, Asn, Arg, Ser, Thr, Val or Tyr
  MOD_RES (20)...(20): Xaa = Ala, Asp, Glu, Gly, Lys, Leu, Met, Gln, Arg, Ser or Thr
  MOD_RES (21)...(21): Xaa = Phe, His, Ile, Pro, Arg, Val, Trp or Tyr
  MOD_RES (22)...(22): Xaa = Ala, Glu, His, Lys, Leu, Gln, Ser, Thr, Val or Tyr
  MOD_RES (24)...(24): Xaa = Ala, Asp, Glu, Phe, Gly, His, Ile, Lys, Leu, Met, Asn, Pro, Gln, Arg, Ser, Thr, Val, Trp or Tyr
  MOD_RES (26)...(26): Xaa = Ala, Asp, Glu, Phe, Gly, His, Ile, Lys, Leu, Asn, Pro, Gln, Arg, Ser, Thr, Val or Tyr
  MOD_RES (27)...(27): Xaa = Ala, Asp, Glu, Phe, His, Ile, Lys, Leu, Met, Asn, Pro, Gln, Arg, Ser, Thr or Val
  MOD_RES (28)...(28): Xaa = Asp, Glu, Gly, Asn, Pro or Ser
  MOD_RES (29)...(29): Xaa = Ala, Asp, Glu, Phe, His, Leu, Met, Gln, Arg, Ser, Thr, Trp or Tyr
  MOD_RES (30)...(30): Xaa = Ala, Asp, Glu, Phe, Gly, His, Ile, Lys, Leu, Met, Asn, Gln, Arg, Ser, Thr, Val or Tyr
  MOD_RES (31)...(31): Xaa = Ala, Phe, Gly, Ile, Lys, Leu, Met, Pro, Gln, Arg, Ser, Thr, Val, Trp or Tyr
  MOD_RES (32)...(32): Xaa = Ala, Asp, Glu, Phe, Gly, His, Lys, Leu, Met, Asn, Pro, Gln, Arg, Ser, Thr, Val or Trp
  MOD_RES (33)...(33): Xaa = Ala, Asp, Glu, Gly, Ile, Lys, Leu, Met, Asn, Pro, Gln, Arg, Ser, Thr, Val or Tyr
  MOD_RES (34)...(34): Xaa = Ala, Asp, Glu, Phe, Gly, His, Ile, Lys, Leu, Met, Asn, Gln, Ser, Thr or Val
CXXXXXXCXXXXCXXXXXXXXXCXCXXXXXXXXXC

SEQ ID NO: 310 - protein, 36 aa, Artificial Sequence
  EGF domain monomer sequence
  MOD_RES (2)...(2): Xaa = Ala, Asp, Glu, Phe, Gly, Ile, Lys, Leu, Met, Asn, Pro, Gln, Arg, Ser, Thr, Val or Tyr
  MOD_RES (3)...(3): Xaa = Ala, Asp, Glu, Phe, Gly, His, Ile, Lys, Leu, Met, Asn, Pro, Gln, Arg, Ser, Thr, Val or Tyr
  MOD_RES (4)...(4): Xaa = Ala, Asp, Glu, Phe, Gly, His, Ile, Lys, Leu, Met, Asn, Pro, Gln, Arg, Ser, Thr, Val or Trp
  MOD_RES (5)...(5): Xaa = Ala, Asp, Glu, Phe, Gly, His, Ile, Lys, Leu, Met, Asn, Pro, Gln, Arg, Ser, Thr or Val
  MOD_RES (6)...(6): Xaa = Ala, Asp, Glu, Phe, Gly, His, Ile, Lys, Leu, Asn, Pro, Gln, Arg, Ser, Val or Tyr
  MOD_RES (7)...(7): Xaa = Ala, Asp, Glu, Gly, Ile, Lys, Leu, Met, Asn, Pro, Gln, Arg, Ser, Thr, Val or Tyr
  MOD_RES (9)...(9): Xaa = Ala, Asp, Glu, Phe, Gly, His, Ile, Lys, Leu, Met, Asn, Pro, Gln, Arg, Ser, Thr or Val
  MOD_RES (10)...(10): Xaa = Ala, Asp, Glu, Phe, Gly, His, Lys, Leu, Asn, Pro, Gln, Arg, Ser, Thr or Tyr
  MOD_RES (11)...(11): Xaa = Ala, Gly or Thr
  MOD_RES (12)...(12): Xaa = Ala, Asp, Glu, Phe, His, Ile, Lys, Leu, Met, Asn, Gln, Arg, Ser, Thr or Val
  MOD_RES (14)...(14): Xaa = Ala, Asp, Phe, His, Ile, Lys, Leu, Met, Asn, Gln, Arg, Ser, Thr, Val or Tyr
  MOD_RES (15)...(15): Xaa = Ala, Asp, Glu, Phe, His, Leu, Met, Asn, Pro, Gln, Arg, Ser, Val or Tyr
  MOD_RES (16)...(16): Xaa = Ala, Asp, Glu, Phe, Gly, His, Leu, Asn, Arg, Ser, Thr, Val or Tyr
  MOD_RES (17)...(17): Xaa = Ala, Asp, Glu, Gly, Asn, Pro, Gln, Arg, Ser or Thr
  MOD_RES (18)...(18): Xaa = Ala, Asp, Glu, Phe, Gly, Lys, Leu, Asn, Pro, Gln, Arg, Ser or Thr
  MOD_RES (19)...(19): Xaa = Ala, Asp, Glu, Gly, Met, Asn, Arg, Ser, Thr, Val or Tyr
  MOD_RES (20)...(20): Xaa = Ala, Asp, Glu, Gly, Lys, Leu, Met, Gln, Arg, Ser or Thr
  MOD_RES (21)...(21): Xaa = Phe, His, Ile, Pro, Arg, Val, Trp or Tyr
  MOD_RES (22)...(22): Xaa = Ala, Glu, His, Lys, Leu, Gln, Ser, Thr, Val or Tyr
  MOD_RES (24)...(24): Xaa = Ala, Asp, Glu, Phe, Gly, His, Ile, Lys, Leu, Met, Asn, Pro, Gln, Arg, Ser, Thr, Val, Trp or Tyr
  MOD_RES (26)...(26): Xaa = Ala, Asp, Glu, Phe, Gly, His, Ile, Lys, Leu, Asn, Pro, Gln, Arg, Ser, Thr, Val or Tyr
  MOD_RES (27)...(27): Xaa = Ala, Asp, Glu, Phe, His, Ile, Lys, Leu, Met, Asn, Pro, Gln, Arg, Ser, Thr or Val
  MOD_RES (28)...(28): Xaa = Asp, Glu, Gly, Asn, Pro or Ser
  MOD_RES (29)...(29): Xaa = Ala, Asp, Glu, Phe, His, Leu, Met, Gln, Arg, Ser, Thr, Trp or Tyr
  MOD_RES (30)...(30): Xaa = Ala, Asp, Glu, Phe, Gly, His, Ile, Lys, Leu, Met, Asn, Gln, Arg, Ser, Thr, Val or Tyr
  MOD_RES (31)...(31): Xaa = Ala, Phe, Gly, Ile, Lys, Leu, Met, Pro, Gln, Arg, Ser, Thr, Val, Trp or Tyr
  MOD_RES (32)...(32): Xaa = Ala, Asp, Glu, Phe, Gly, His, Lys, Leu, Met, Asn, Pro, Gln, Arg, Ser, Thr, Val or Trp
  MOD_RES (33)...(33): Xaa = Ala, Asp, Glu, Gly, Ile, Lys, Leu, Met, Asn, Pro, Gln, Arg, Ser, Thr, Val or Tyr
  MOD_RES (34)...(34): Xaa = Ala, Asp, Glu, Phe, Gly, His, Ile, Lys, Leu, Met, Asn, Gln, Ser, Thr or Val
  MOD_RES (35)...(35): Xaa = Glu, Phe, Gly, His, Ile, Lys, Leu, Met, Asn, Pro, Gln, Arg, Ser, Thr or Trp
CXXXXXXCXXXXCXXXXXXXXXCXCXXXXXXXXXXC

SEQ ID NO: 311 - protein, 37 aa, Artificial Sequence
  EGF domain monomer sequence
  MOD_RES (2)...(2): Xaa = Ala, Asp, Glu, Phe, Gly, Ile, Lys, Leu, Met, Asn, Pro, Gln, Arg, Ser, Thr, Val or Tyr
  MOD_RES (3)...(3): Xaa = Ala, Asp, Glu, Phe, Gly, His, Ile, Lys, Leu, Met, Asn, Pro, Gln, Arg, Ser, Thr, Val or Tyr
  MOD_RES (4)...(4): Xaa = Ala, Asp, Glu, Phe, Gly, His, Ile, Lys, Leu, Met, Asn, Pro, Gln, Arg, Ser, Thr, Val or Trp
  MOD_RES (5)...(5): Xaa = Ala, Asp, Glu, Phe, Gly, His, Ile, Lys, Leu, Met, Asn, Pro, Gln, Arg, Ser, Thr or Val
  MOD_RES (6)...(6): Xaa = Ala, Asp, Glu, Phe, Gly, His, Ile, Lys, Leu, Asn, Pro, Gln, Arg, Ser, Val or Tyr
  MOD_RES (7)...(7): Xaa = Ala, Asp, Glu, Gly, Ile, Lys, Leu, Met, Asn, Pro, Gln, Arg, Ser, Thr, Val or Tyr
  MOD_RES (9)...(9): Xaa = Ala, Asp, Glu, Phe, Gly, His, Ile, Lys, Leu, Met, Asn, Pro, Gln, Arg, Ser, Thr or Val
  MOD_RES (10)...(10): Xaa = Ala, Asp, Glu, Phe, Gly, His, Lys, Leu, Asn, Pro, Gln, Arg, Ser, Thr or Tyr
  MOD_RES (11)...(11): Xaa = Ala, Gly or Thr
  MOD_RES (12)...(12): Xaa = Ala, Asp, Glu, Phe, His, Ile, Lys, Leu, Met, Asn, Gln, Arg, Ser, Thr or Val
  MOD_RES (14)...(14): Xaa = Ala, Asp, Phe, His, Ile, Lys, Leu, Met, Asn, Gln, Arg, Ser, Thr, Val or Tyr
  MOD_RES (15)...(15): Xaa = Ala, Asp, Glu, Phe, His, Leu, Met, Asn, Pro, Gln, Arg, Ser, Val or Tyr
  MOD_RES (16)...(16): Xaa = Ala, Asp, Glu, Phe, Gly, His, Leu, Asn, Arg, Ser, Thr, Val or Tyr
  MOD_RES (17)...(17): Xaa = Ala, Asp, Glu, Gly, Asn, Pro, Gln, Arg, Ser or Thr
  MOD_RES (18)...(18): Xaa = Ala, Asp, Glu, Phe, Gly, Lys, Leu, Asn, Pro, Gln, Arg, Ser or Thr
  MOD_RES (19)...(19): Xaa = Ala, Asp, Glu, Gly, Met, Asn, Arg, Ser, Thr, Val or Tyr
  MOD_RES (20)...(20): Xaa = Ala, Asp, Glu, Gly, Lys, Leu, Met, Gln, Arg, Ser or Thr
  MOD_RES (21)...(21): Xaa = Phe, His, Ile, Pro, Arg, Val, Trp or Tyr
  MOD_RES (22)...(22): Xaa = Ala, Glu, His, Lys, Leu, Gln, Ser, Thr, Val or Tyr
  MOD_RES (24)...(24): Xaa = Ala, Asp, Glu, Phe, Gly, His, Ile, Lys, Leu, Met, Asn, Pro, Gln, Arg, Ser, Thr, Val, Trp or Tyr
  MOD_RES (26)...(26): Xaa = Ala, Asp, Glu, Phe, Gly, His, Ile, Lys, Leu, Asn, Pro, Gln, Arg, Ser, Thr, Val or Tyr
  MOD_RES (27)...(27): Xaa = Ala, Asp, Glu, Phe, His, Ile, Lys, Leu, Met, Asn, Pro, Gln, Arg, Ser, Thr or Val
  MOD_RES (28)...(28): Xaa = Asp, Glu, Gly, Asn, Pro or Ser
  MOD_RES (29)...(29): Xaa = Ala, Asp, Glu, Phe, His, Leu, Met, Gln, Arg, Ser, Thr, Trp or Tyr
  MOD_RES (30)...(30): Xaa = Ala, Asp, Glu, Phe, Gly, His, Ile, Lys, Leu, Met, Asn, Gln, Arg, Ser, Thr, Val or Tyr
  MOD_RES (31)...(31): Xaa = Ala, Phe, Gly, Ile, Lys, Leu, Met, Pro, Gln, Arg, Ser, Thr, Val, Trp or Tyr
  MOD_RES (32)...(32): Xaa = Ala, Asp, Glu, Phe, Gly, His, Lys, Leu, Met, Asn, Pro, Gln, Arg, Ser, Thr, Val or Trp
  MOD_RES (33)...(33): Xaa = Ala, Asp, Glu, Gly, Ile, Lys, Leu, Met, Asn, Pro, Gln, Arg, Ser, Thr, Val or Tyr
  MOD_RES (34)...(34): Xaa = Ala, Asp, Glu, Phe, Gly, His, Ile, Lys, Leu, Met, Asn, Gln, Ser, Thr or Val
  MOD_RES (35)...(35): Xaa = Glu, Phe, Gly, His, Ile, Lys, Leu, Met, Asn, Pro, Gln, Arg, Ser, Thr or Trp
  MOD_RES (36)...(36): Xaa = Ala, Asp, Glu, Phe, Gly, His, Lys, Leu, Met, Asn, Pro, Gln, Arg, Ser, Thr, Val or Tyr
CXXXXXXCXXXXCXXXXXXXXXCXCXXXXXXXXXXXC

SEQ ID NO: 312 - protein, 38 aa, Artificial Sequence
  EGF domain monomer sequence
  MOD_RES (2)...(2): Xaa = Ala, Asp, Glu, Phe, Gly, Ile, Lys, Leu, Met, Asn, Pro, Gln, Arg, Ser, Thr, Val or Tyr
  MOD_RES (3)...(3): Xaa = Ala, Asp, Glu, Phe, Gly, His, Ile, Lys, Leu, Met, Asn, Pro, Gln, Arg, Ser, Thr, Val or Tyr
  MOD_RES (4)...(4): Xaa = Ala, Asp, Glu, Phe, Gly, His, Ile, Lys, Leu, Met, Asn, Pro, Gln, Arg, Ser, Thr, Val or Trp
  MOD_RES (5)...(5): Xaa = Ala, Asp, Glu, Phe, Gly, His, Ile, Lys, Leu, Met, Asn, Pro, Gln, Arg, Ser, Thr or Val
  MOD_RES (6)...(6): Xaa = Ala, Asp, Glu, Phe, Gly, His, Ile, Lys, Leu, Asn, Pro, Gln, Arg, Ser, Val or Tyr
  MOD_RES (7)...(7): Xaa = Ala, Asp, Glu, Gly, Ile, Lys, Leu, Met, Asn, Pro, Gln, Arg, Ser, Thr, Val or Tyr
  MOD_RES (9)...(9): Xaa = Ala, Asp, Glu, Phe, Gly, His, Ile, Lys, Leu, Met, Asn, Pro, Gln, Arg, Ser, Thr or Val
  MOD_RES (10)...(10): Xaa = Ala, Asp, Glu, Phe, Gly, His, Lys, Leu, Asn, Pro, Gln, Arg, Ser, Thr or Tyr
  MOD_RES (11)...(11): Xaa = Ala, Gly or Thr
  MOD_RES (12)...(12): Xaa = Ala, Asp, Glu, Phe, His, Ile, Lys, Leu, Met, Asn, Gln, Arg, Ser, Thr or Val
  MOD_RES (14)...(14): Xaa = Ala, Asp, Phe, His, Ile, Lys, Leu, Met, Asn, Gln, Arg, Ser, Thr, Val or Tyr
  MOD_RES (15)...(15): Xaa = Ala, Asp, Glu, Phe, His, Leu, Met, Asn, Pro, Gln, Arg, Ser, Val or Tyr
  MOD_RES (16)...(16): Xaa = Ala, Asp, Glu, Phe, Gly, His, Leu, Asn, Arg, Ser, Thr, Val or Tyr
  MOD_RES (17)...(17): Xaa = Ala, Asp, Glu, Gly, Asn, Pro, Gln, Arg, Ser or Thr
  MOD_RES (18)...(18): Xaa = Ala, Asp, Glu, Phe, Gly, Lys, Leu, Asn, Pro, Gln, Arg, Ser or Thr
  MOD_RES (19)...(19): Xaa = Ala, Asp, Glu, Gly, Met, Asn, Arg, Ser, Thr, Val or Tyr
  MOD_RES (20)...(20): Xaa = Ala, Asp, Glu, Gly, Lys, Leu, Met, Gln, Arg, Ser or Thr
  MOD_RES (21)...(21): Xaa = Phe, His, Ile, Pro, Arg, Val, Trp or Tyr
  MOD_RES (22)...(22): Xaa = Ala, Glu, His, Lys, Leu, Gln, Ser, Thr, Val or Tyr
  MOD_RES (24)...(24): Xaa = Ala, Asp, Glu, Phe, Gly, His, Ile, Lys, Leu, Met, Asn, Pro, Gln, Arg, Ser, Thr, Val, Trp or Tyr
  MOD_RES (26)...(26): Xaa = Ala, Asp, Glu, Phe, Gly, His, Ile, Lys, Leu, Asn, Pro, Gln, Arg, Ser, Thr, Val or Tyr
  MOD_RES (27)...(27): Xaa = Ala, Asp, Glu, Phe, His, Ile, Lys, Leu, Met, Asn, Pro, Gln, Arg, Ser, Thr or Val
  MOD_RES (28)...(28): Xaa = Asp, Glu, Gly, Asn, Pro or Ser
  MOD_RES (29)...(29): Xaa = Ala, Asp, Glu, Phe, His, Leu, Met, Gln, Arg, Ser, Thr, Trp or Tyr
  MOD_RES (30)...(30): Xaa = Ala, Asp, Glu, Phe, Gly, His, Ile, Lys, Leu, Met, Asn, Gln, Arg, Ser, Thr, Val or Tyr
  MOD_RES (31)...(31): Xaa = Ala, Phe, Gly, Ile, Lys, Leu, Met, Pro, Gln, Arg, Ser, Thr, Val, Trp or Tyr
  MOD_RES (32)...(32): Xaa = Ala, Asp, Glu, Phe, Gly, His, Lys, Leu, Met, Asn, Pro, Gln, Arg, Ser, Thr, Val or Trp
  MOD_RES (33)...(33): Xaa = Ala, Asp, Glu, Gly, Ile, Lys, Leu, Met, Asn, Pro, Gln, Arg, Ser, Thr, Val or Tyr
  MOD_RES (34)...(34): Xaa = Ala, Asp, Glu, Phe, Gly, His, Ile, Lys, Leu, Met, Asn, Gln, Ser, Thr or Val
  MOD_RES (35)...(35): Xaa = Glu, Phe, Gly, His, Ile, Lys, Leu, Met, Asn, Pro, Gln, Arg, Ser, Thr or Trp
  MOD_RES (36)...(36): Xaa = Ala, Asp, Glu, Phe, Gly, His, Lys, Leu, Met, Asn, Pro, Gln, Arg, Ser, Thr, Val or Tyr
  MOD_RES (37)...(37): Xaa = Ala, Asp, Glu, Phe, Gly, His, Ile, Lys, Met, Asn, Gln, Arg, Ser, Thr, Val or Tyr
CXXXXXXCXXXXCXXXXXXXXXCXCXXXXXXXXXXXXC

SEQ ID NO: 313 - protein, 34 aa, Artificial Sequence
  EGF domain monomer sequence
  MOD_RES (2)...(2): Xaa = Ala, Asp, Glu, Gly, Ile, Lys, Leu, Gln, Arg, Ser, Thr or Val
  MOD_RES (3)...(3): Xaa = Ala, Asp, Glu, Phe, Gly, His, Ile, Lys, Leu, Met, Asn, Pro, Gln, Arg, Ser, Thr or Val
  MOD_RES (4)...(4): Xaa = Ala, Glu, Phe, Gly, His, Leu, Asn, Pro, Gln, Arg, Ser, Thr, Trp or Tyr
  MOD_RES (5)...(5): Xaa = Ala, Asp, Glu, Phe, Gly, His, Ile, Lys, Leu, Asn, Pro, Arg, Ser or Thr
  MOD_RES (6)...(6): Xaa = Ala, Phe, Gly, Ile, Lys, Leu, Met, Asn, Pro, Gln, Arg, Ser, Thr, Val or Tyr
  MOD_RES (8)...(8): Xaa = Ala, Cys, Asp, Glu, Phe, Gly, His, Lys, Leu, Met, Asn, Pro, Gln, Arg, Ser, Val or Tyr
  MOD_RES (9)...(9): Xaa = Ala, Asp, Glu, Gly, His, Ile, Lys, Leu, Met, Asn, Pro, Gln, Arg, Ser, Thr, Val or Tyr
  MOD_RES (10)...(10): Xaa = Ala, Asp, Glu, Phe, Gly, His, Lys, Leu, Asn, Gln, Arg, Ser, Thr or Tyr
  MOD_RES (11)...(11): Xaa = Ala, Phe, Gly, His, Gln, Ser, Thr or Val
  MOD_RES (12)...(12): Xaa = Ala, Asp, Glu, Phe, His, Ile, Lys, Leu, Met, Asn, Gln, Arg, Ser, Thr or Val
  MOD_RES (14)...(14): Xaa = Ala, Asp, Phe, His, Ile, Lys, Leu, Met, Asn, Gln, Arg, Ser, Thr, Val or Tyr
  MOD_RES (15)...(15): Xaa = Ala, Asp, Glu, Phe, His, Leu, Met, Asn, Pro, Gln, Arg, Ser, Val or Tyr
  MOD_RES (16)...(16): Xaa = Ala, Asp, Glu, Phe, Gly, His, Leu, Asn, Arg, Ser, Thr, Val or Tyr
  MOD_RES (17)...(17): Xaa = Ala, Asp, Glu, Gly, Asn, Pro, Gln, Arg, Ser or Thr
  MOD_RES (18)...(18): Xaa = Ala, Asp, Glu, Phe, Gly, Lys, Leu, Asn, Pro, Gln, Arg, Ser or Thr
  MOD_RES (19)...(19): Xaa = Ala, Asp, Glu, Gly, Met, Asn, Arg, Ser, Thr, Val or Tyr
  MOD_RES (20)...(20): Xaa = Ala, Asp, Glu, Gly, Lys, Leu, Met, Gln, Arg, Ser or Thr
  MOD_RES (21)...(21): Xaa = Phe, His, Ile, Pro, Arg, Val, Trp or Tyr
  MOD_RES (22)...(22): Xaa = Ala, Glu, His, Lys, Leu, Gln, Ser, Thr, Val or Tyr
  MOD_RES (24)...(24): Xaa = Ala, Asp, Glu, Phe, Gly, His, Ile, Lys, Leu, Met, Asn, Pro, Gln, Arg, Ser, Thr, Val, Trp or Tyr
  MOD_RES (26)...(26): Xaa = Ala, Asp, Glu, Phe, His, Lys, Leu, Met, Asn, Pro, Gln, Arg, Ser, Thr, Val, Trp or Tyr
  MOD_RES (27)...(27): Xaa = Ala, Asp, Glu, Phe, Gly, His, Lys, Leu, Asn, Pro, Gln, Arg, Ser, Thr, Val or Tyr
  MOD_RES (28)...(28): Xaa = Ala, Glu, Gly, His, Lys, Leu, Asn, Pro, Arg, Ser, Thr or Tyr
  MOD_RES (29)...(29): Xaa = Phe, His, Ile, Leu, Met, Arg, Thr, Trp or Tyr
  MOD_RES (30)...(30): Xaa = Ala, Asp, Glu, Phe, Gly, His, Ile, Lys, Leu, Met, Asn, Gln, Arg, Ser, Thr, Val or Tyr
  MOD_RES (31)...(31): Xaa = Asp, Gly or Ser
  MOD_RES (32)...(32): Xaa = Ala, Asp, Glu, Phe, His, Ile, Lys, Leu, Asn, Pro, Gln, Arg, Ser, Thr, Val or Tyr
  MOD_RES (33)...(33): Xaa = Ala, Asp, Glu, Phe, His, Ile, Lys, Leu, Met, Asn, Gln, Arg, Ser, Thr or Tyr
CXXXXXCXXXXXCXXXXXXXXXCXCXXXXXXXXC

SEQ ID NO: 314 - protein, 35 aa, Artificial Sequence
  EGF domain monomer sequence
  MOD_RES (2)...(2): Xaa = Ala, Asp, Glu, Gly, Ile, Lys, Leu, Gln, Arg, Ser, Thr or Val
  MOD_RES (3)...(3): Xaa = Ala, Asp, Glu, Phe, Gly, His, Ile, Lys, Leu, Met, Asn, Pro, Gln, Arg, Ser, Thr or Val
  MOD_RES (4)...(4): Xaa = Ala, Glu, Phe, Gly, His, Leu, Asn, Pro, Gln, Arg, Ser, Thr, Trp or Tyr
  MOD_RES (5)...(5): Xaa = Ala, Asp, Glu, Phe, Gly, His, Ile, Lys, Leu, Asn, Pro, Arg, Ser or Thr
  MOD_RES (6)...(6): Xaa = Ala, Phe, Gly, Ile, Lys, Leu, Met, Asn, Pro, Gln, Arg, Ser, Thr, Val or Tyr
  MOD_RES (8)...(8): Xaa = Ala, Cys, Asp, Glu, Phe, Gly, His, Lys, Leu, Met, Asn, Pro, Gln, Arg, Ser, Val or Tyr
  MOD_RES (9)...(9): Xaa = Ala, Asp, Glu, Gly, His, Ile, Lys, Leu, Met, Asn, Pro, Gln, Arg, Ser, Thr, Val or Tyr
  MOD_RES (10)...(10): Xaa = Ala, Asp, Glu, Phe, Gly, His, Lys, Leu, Asn, Gln, Arg, Ser, Thr or Tyr
  MOD_RES (11)...(11): Xaa = Ala, Phe, Gly, His, Gln, Ser, Thr or Val
  MOD_RES (12)...(12): Xaa = Ala, Asp, Glu, Phe, His, Ile, Lys, Leu, Met, Asn, Gln, Arg, Ser, Thr or Val
  MOD_RES (14)...(14): Xaa = Ala, Asp, Phe, His, Ile, Lys, Leu, Met, Asn, Gln, Arg, Ser, Thr, Val or Tyr
  MOD_RES (15)...(15): Xaa = Ala, Asp, Glu, Phe, His, Leu, Met, Asn, Pro, Gln, Arg, Ser, Val or Tyr
  MOD_RES (16)...(16): Xaa = Ala, Asp, Glu, Phe, Gly, His, Leu, Asn, Arg, Ser, Thr, Val or Tyr
  MOD_RES (17)...(17): Xaa = Ala, Asp, Glu, Gly, Asn, Pro, Gln, Arg, Ser or Thr
  MOD_RES (18)...(18): Xaa = Ala, Asp, Glu, Phe, Gly, Lys, Leu, Asn, Pro, Gln, Arg, Ser or Thr
  MOD_RES (19)...(19): Xaa = Ala, Asp, Glu, Gly, Met, Asn, Arg, Ser, Thr, Val or Tyr
  MOD_RES (20)...(20): Xaa = Ala, Asp, Glu, Gly, Lys, Leu, Met, Gln, Arg, Ser or Thr
  MOD_RES (21)...(21): Xaa = Phe, His, Ile, Pro, Arg, Val, Trp or Tyr
  MOD_RES (22)...(22): Xaa = Ala, Glu, His, Lys, Leu, Gln, Ser, Thr, Val or Tyr
  MOD_RES (24)...(24): Xaa = Ala, Asp, Glu, Phe, Gly, His, Ile, Lys, Leu, Met, Asn, Pro, Gln, Arg, Ser, Thr, Val, Trp or Tyr
  MOD_RES (26)...(26): Xaa = Ala, Asp, Glu, Phe, Gly, His, Ile, Lys, Leu, Asn, Pro, Gln, Arg, Ser, Thr, Val or Tyr
  MOD_RES (27)...(27): Xaa = Ala, Asp, Glu, Phe, His, Ile, Lys, Leu, Met, Asn, Pro, Gln, Arg, Ser, Thr or Val
  MOD_RES (28)...(28): Xaa = Asp, Glu, Gly, Asn, Pro or Ser
  MOD_RES (29)...(29): Xaa = Ala, Asp, Glu, Phe, His, Leu, Met, Gln, Arg, Ser, Thr, Trp or Tyr
  MOD_RES (30)...(30): Xaa = Ala, Asp, Glu, Phe, Gly, His, Ile, Lys, Leu, Met, Asn, Gln, Arg, Ser, Thr, Val or Tyr
  MOD_RES (31)...(31): Xaa = Ala, Phe, Gly, Ile, Lys, Leu, Met, Pro, Gln, Arg, Ser, Thr, Val, Trp or Tyr
  MOD_RES (32)...(32): Xaa = Ala, Asp, Glu, Phe, Gly, His, Lys, Leu, Met, Asn, Pro, Gln, Arg, Ser, Thr, Val or Trp
  MOD_RES (33)...(33): Xaa = Ala, Asp, Glu, Gly, Ile, Lys, Leu, Met, Asn, Pro, Gln, Arg, Ser, Thr, Val or Tyr
  MOD_RES (34)...(34): Xaa = Ala, Asp, Glu, Phe, Gly, His, Ile, Lys, Leu, Met, Asn, Gln, Ser, Thr or Val
CXXXXXCXXXXXCXXXXXXXXXCXCXXXXXXXXXC

SEQ ID NO: 315 - protein, 36 aa, Artificial Sequence
  EGF domain monomer sequence
  MOD_RES (2)...(2): Xaa = Ala, Asp, Glu, Gly, Ile, Lys, Leu, Gln, Arg, Ser, Thr or Val
  MOD_RES (3)...(3): Xaa = Ala, Asp, Glu, Phe, Gly, His, Ile, Lys, Leu, Met, Asn, Pro, Gln, Arg, Ser, Thr or Val
  MOD_RES (4)...(4): Xaa = Ala, Glu, Phe, Gly, His, Leu, Asn, Pro, Gln, Arg, Ser, Thr, Trp or Tyr
  MOD_RES (5)...(5): Xaa = Ala, Asp, Glu, Phe, Gly, His, Ile, Lys, Leu, Asn, Pro, Arg, Ser or Thr
  MOD_RES (6)...(6): Xaa = Ala, Phe, Gly, Ile, Lys, Leu, Met, Asn, Pro, Gln, Arg, Ser, Thr, Val or Tyr
  MOD_RES (8)...(8): Xaa = Ala, Cys, Asp, Glu, Phe, Gly, His, Lys, Leu, Met, Asn, Pro, Gln, Arg, Ser, Val or Tyr
  MOD_RES (9)...(9): Xaa = Ala, Asp, Glu, Gly, His, Ile, Lys, Leu, Met, Asn, Pro, Gln, Arg, Ser, Thr, Val or Tyr
  MOD_RES (10)...(10): Xaa = Ala, Asp, Glu, Phe, Gly, His, Lys, Leu, Asn, Gln, Arg, Ser, Thr or Tyr
  MOD_RES (11)...(11): Xaa = Ala, Phe, Gly, His, Gln, Ser, Thr or Val
  MOD_RES (12)...(12): Xaa = Ala, Asp, Glu, Phe, His, Ile, Lys, Leu, Met, Asn, Gln, Arg, Ser, Thr or Val
  MOD_RES (14)...(14): Xaa = Ala, Asp, Phe, His, Ile, Lys, Leu, Met, Asn, Gln, Arg, Ser, Thr, Val or Tyr
  MOD_RES (15)...(15): Xaa = Ala, Asp, Glu, Phe, His, Leu, Met, Asn, Pro, Gln, Arg, Ser, Val or Tyr
  MOD_RES (16)...(16): Xaa = Ala, Asp, Glu, Phe, Gly, His, Leu, Asn, Arg, Ser, Thr, Val or Tyr
  MOD_RES (17)...(17): Xaa = Ala, Asp, Glu, Gly, Asn, Pro, Gln, Arg, Ser or Thr
  MOD_RES (18)...(18): Xaa = Ala, Asp, Glu, Phe, Gly, Lys, Leu, Asn, Pro, Gln, Arg, Ser or Thr
  MOD_RES (19)...(19): Xaa = Ala, Asp, Glu, Gly, Met, Asn, Arg, Ser, Thr, Val or Tyr
  MOD_RES (20)...(20): Xaa = Ala, Asp, Glu, Gly, Lys, Leu, Met, Gln, Arg, Ser or Thr
  MOD_RES (21)...(21): Xaa = Phe, His, Ile, Pro, Arg, Val, Trp or Tyr
  MOD_RES (22)...(22): Xaa = Ala, Glu, His, Lys, Leu, Gln, Ser, Thr, Val or Tyr
  MOD_RES (24)...(24): Xaa = Ala, Asp, Glu, Phe, Gly, His, Ile, Lys, Leu, Met, Asn, Pro, Gln, Arg, Ser, Thr, Val, Trp or Tyr
  MOD_RES (26)...(26): Xaa = Ala, Asp, Glu, Phe, Gly, His, Ile, Lys, Leu, Asn, Pro, Gln, Arg, Ser, Thr, Val or Tyr
  MOD_RES (27)...(27): Xaa = Ala, Asp, Glu, Phe, His, Ile, Lys, Leu, Met, Asn, Pro, Gln, Arg, Ser, Thr or Val
  MOD_RES (28)...(28): Xaa = Asp, Glu, Gly, Asn, Pro or Ser
  MOD_RES (29)...(29): Xaa = Ala, Asp, Glu, Phe, His, Leu, Met, Gln, Arg, Ser, Thr, Trp or Tyr
  MOD_RES (30)...(30): Xaa = Ala, Asp, Glu, Phe, Gly, His, Ile, Lys, Leu, Met, Asn, Gln, Arg, Ser, Thr, Val or Tyr
  MOD_RES (31)...(31): Xaa = Ala, Phe, Gly, Ile, Lys, Leu, Met, Pro, Gln, Arg, Ser, Thr, Val, Trp or Tyr
  MOD_RES (32)...(32): Xaa = Ala, Asp, Glu, Phe, Gly, His, Lys, Leu, Met, Asn, Pro, Gln, Arg, Ser, Thr, Val or Trp
  MOD_RES (33)...(33): Xaa = Ala, Asp, Glu, Gly, Ile, Lys, Leu, Met, Asn, Pro, Gln, Arg, Ser, Thr, Val or Tyr
  MOD_RES (34)...(34): Xaa = Ala, Asp, Glu, Phe, Gly, His, Ile, Lys, Leu, Met, Asn, Gln, Ser, Thr or Val
  MOD_RES (35)...(35): Xaa = Glu, Phe, Gly, His, Ile, Lys, Leu, Met, Asn, Pro, Gln, Arg, Ser, Thr or Trp
CXXXXXCXXXXXCXXXXXXXXXCXCXXXXXXXXXXC

SEQ ID NO: 316 - protein, 37 aa, Artificial Sequence
  EGF domain monomer sequence
  MOD_RES (2)...(2): Xaa = Ala, Asp, Glu, Gly, Ile, Lys, Leu, Gln, Arg, Ser, Thr or Val
  MOD_RES (3)...(3): Xaa = Ala, Asp, Glu, Phe, Gly, His, Ile, Lys, Leu, Met, Asn, Pro, Gln, Arg, Ser, Thr or Val
  MOD_RES (4)...(4): Xaa = Ala, Glu, Phe, Gly, His, Leu, Asn, Pro, Gln, Arg, Ser, Thr, Trp or Tyr
  MOD_RES (5)...(5): Xaa = Ala, Asp, Glu, Phe, Gly, His, Ile, Lys, Leu, Asn, Pro, Arg, Ser or Thr
  MOD_RES (6)...(6): Xaa = Ala, Phe, Gly, Ile, Lys, Leu, Met, Asn, Pro, Gln, Arg, Ser, Thr, Val or Tyr
  MOD_RES (8)...(8): Xaa = Ala, Cys, Asp, Glu, Phe, Gly, His, Lys, Leu, Met, Asn, Pro, Gln, Arg, Ser, Val or Tyr
  MOD_RES (9)...(9): Xaa = Ala, Asp, Glu, Gly, His, Ile, Lys, Leu, Met, Asn, Pro, Gln, Arg, Ser, Thr, Val or Tyr
  MOD_RES (10)...(10): Xaa = Ala, Asp, Glu, Phe, Gly, His, Lys, Leu, Asn, Gln, Arg, Ser, Thr or Tyr
  MOD_RES (11)...(11): Xaa = Ala, Phe, Gly, His, Gln, Ser, Thr or Val
  MOD_RES (12)...(12): Xaa = Ala, Asp, Glu, Phe, His, Ile, Lys, Leu, Met, Asn, Gln, Arg, Ser, Thr or Val
  MOD_RES (14)...(14): Xaa = Ala, Asp, Phe, His, Ile, Lys, Leu, Met, Asn, Gln, Arg, Ser, Thr, Val or Tyr
  MOD_RES (15)...(15): Xaa = Ala, Asp, Glu, Phe, His, Leu, Met, Asn, Pro, Gln, Arg, Ser, Val or Tyr
  MOD_RES (16)...(16): Xaa = Ala, Asp, Glu, Phe, Gly, His, Leu, Asn, Arg, Ser, Thr, Val or Tyr
  MOD_RES (17)...(17): Xaa = Ala, Asp, Glu, Gly, Asn, Pro, Gln, Arg, Ser or Thr
  MOD_RES (18)...(18): Xaa = Ala, Asp, Glu, Phe, Gly, Lys, Leu, Asn, Pro, Gln, Arg, Ser or Thr
  MOD_RES (19)...(19): Xaa = Ala, Asp, Glu, Gly, Met, Asn, Arg, Ser, Thr, Val or Tyr
  MOD_RES (20)...(20): Xaa = Ala, Asp, Glu, Gly, Lys, Leu, Met, Gln, Arg, Ser or Thr
  MOD_RES (21)...(21): Xaa = Phe, His, Ile, Pro, Arg, Val, Trp or Tyr
  MOD_RES (22)...(22): Xaa = Ala, Glu, His, Lys, Leu, Gln, Ser, Thr, Val or Tyr
  MOD_RES (24)...(24): Xaa = Ala, Asp, Glu, Phe, Gly, His, Ile, Lys, Leu, Met, Asn, Pro, Gln, Arg, Ser, Thr, Val, Trp or Tyr
  MOD_RES (26)...(26): Xaa = Ala, Asp, Glu, Phe, Gly, His, Ile, Lys, Leu, Asn, Pro, Gln, Arg, Ser, Thr, Val or Tyr
  MOD_RES (27)...(27): Xaa = Ala, Asp, Glu, Phe, His, Ile, Lys, Leu, Met, Asn, Pro, Gln, Arg, Ser, Thr or Val
  MOD_RES (28)...(28): Xaa = Asp, Glu, Gly, Asn, Pro or Ser
  MOD_RES (29)...(29): Xaa = Ala, Asp, Glu, Phe, His, Leu, Met, Gln, Arg, Ser, Thr, Trp or Tyr
  MOD_RES (30)...(30): Xaa = Ala, Asp, Glu, Phe, Gly, His, Ile, Lys, Leu, Met, Asn, Gln, Arg, Ser, Thr, Val or Tyr
  MOD_RES (31)...(31): Xaa = Ala, Phe, Gly, Ile, Lys, Leu, Met, Pro, Gln, Arg, Ser, Thr, Val, Trp or Tyr
  MOD_RES (32)...(32): Xaa = Ala, Asp, Glu, Phe, Gly, His, Lys, Leu, Met, Asn, Pro, Gln, Arg, Ser, Thr, Val or Trp
  MOD_RES (33)...(33): Xaa = Ala, Asp, Glu, Gly, Ile, Lys, Leu, Met, Asn, Pro, Gln, Arg, Ser, Thr, Val or Tyr
  MOD_RES (34)...(34): Xaa = Ala, Asp, Glu, Phe, Gly, His, Ile, Lys, Leu, Met, Asn, Gln, Ser, Thr or Val
  MOD_RES (35)...(35): Xaa = Glu, Phe, Gly, His, Ile, Lys, Leu, Met, Asn, Pro, Gln, Arg, Ser, Thr or Trp
  MOD_RES (36)...(36): Xaa = Ala, Asp, Glu, Phe, Gly, His, Lys, Leu, Met, Asn, Pro, Gln, Arg, Ser, Thr, Val or Tyr
CXXXXXCXXXXXCXXXXXXXXXCXCXXXXXXXXXXXC

SEQ ID NO: 317 - protein, 38 aa, Artificial Sequence
  EGF domain monomer sequence
  MOD_RES (2)...(2): Xaa = Ala, Asp, Glu, Gly, Ile, Lys, Leu, Gln, Arg, Ser, Thr or Val
  MOD_RES (3)...(3): Xaa = Ala, Asp, Glu, Phe, Gly, His, Ile, Lys, Leu, Met, Asn, Pro, Gln, Arg, Ser, Thr or Val
  MOD_RES (4)...(4): Xaa = Ala, Glu, Phe, Gly, His, Leu, Asn, Pro, Gln, Arg, Ser, Thr, Trp or Tyr
  MOD_RES (5)...(5): Xaa = Ala, Asp, Glu, Phe, Gly, His, Ile, Lys, Leu, Asn, Pro, Arg, Ser or Thr
  MOD_RES (6)...(6): Xaa = Ala, Phe, Gly, Ile, Lys, Leu, Met, Asn, Pro, Gln, Arg, Ser, Thr, Val or Tyr
  MOD_RES (8)...(8): Xaa = Ala, Cys, Asp, Glu, Phe, Gly, His, Lys, Leu, Met, Asn, Pro, Gln, Arg, Ser, Val or Tyr
  MOD_RES (9)...(9): Xaa = Ala, Asp, Glu, Gly, His, Ile, Lys, Leu, Met, Asn, Pro, Gln, Arg, Ser, Thr, Val or Tyr
  MOD_RES (10)...(10): Xaa = Ala, Asp, Glu, Phe, Gly, His, Lys, Leu, Asn, Gln, Arg, Ser, Thr or Tyr
  MOD_RES (11)...(11): Xaa = Ala, Phe, Gly, His, Gln, Ser, Thr or Val
  MOD_RES (12)...(12): Xaa = Ala, Asp, Glu, Phe, His, Ile, Lys, Leu, Met, Asn, Gln, Arg, Ser, Thr or Val
  MOD_RES (14)...(14): Xaa = Ala, Asp, Phe, His, Ile, Lys, Leu, Met, Asn, Gln, Arg, Ser, Thr, Val or Tyr
  MOD_RES (15)...(15): Xaa = Ala, Asp, Glu, Phe, His, Leu, Met, Asn, Pro, Gln, Arg, Ser, Val or Tyr
  MOD_RES (16)...(16): Xaa = Ala, Asp, Glu, Phe, Gly, His, Leu, Asn, Arg, Ser, Thr, Val or Tyr
  MOD_RES (17)...(17): Xaa = Ala, Asp, Glu, Gly, Asn, Pro, Gln, Arg, Ser or Thr
  MOD_RES (18)...(18): Xaa = Ala, Asp, Glu, Phe, Gly, Lys, Leu, Asn, Pro, Gln, Arg, Ser or Thr
  MOD_RES (19)...(19): Xaa = Ala, Asp, Glu, Gly, Met, Asn, Arg, Ser, Thr, Val or Tyr
  MOD_RES (20)...(20): Xaa = Ala, Asp, Glu, Gly, Lys, Leu, Met, Gln, Arg, Ser or Thr
  MOD_RES (21)...(21): Xaa = Phe, His, Ile, Pro, Arg, Val, Trp or Tyr
  MOD_RES (22)...(22): Xaa = Ala, Glu, His, Lys, Leu, Gln, Ser, Thr, Val or Tyr
  MOD_RES (24)...(24): Xaa = Ala, Asp, Glu, Phe, Gly, His, Ile, Lys, Leu, Met, Asn, Pro, Gln, Arg, Ser, Thr, Val, Trp or Tyr
  MOD_RES (26)...(26): Xaa = Ala, Asp, Glu, Phe, Gly, His, Ile, Lys, Leu, Asn, Pro, Gln, Arg, Ser, Thr, Val or Tyr
  MOD_RES (27)...(27): Xaa = Ala, Asp, Glu, Phe, His, Ile, Lys, Leu, Met, Asn, Pro, Gln, Arg, Ser, Thr or Val
  MOD_RES (28)...(28): Xaa = Asp, Glu, Gly, Asn, Pro or Ser
  MOD_RES (29)...(29): Xaa = Ala, Asp, Glu, Phe, His, Leu, Met, Gln, Arg, Ser, Thr, Trp or Tyr
  MOD_RES (30)...(30): Xaa = Ala, Asp, Glu, Phe, Gly, His, Ile, Lys, Leu, Met, Asn, Gln, Arg, Ser, Thr, Val or Tyr
  MOD_RES (31)...(31): Xaa = Ala, Phe, Gly, Ile, Lys, Leu, Met, Pro, Gln, Arg, Ser, Thr, Val, Trp or Tyr
  MOD_RES (32)...(32): Xaa = Ala, Asp, Glu, Phe, Gly, His, Lys, Leu, Met, Asn, Pro, Gln, Arg, Ser, Thr, Val or Trp
  MOD_RES (33)...(33): Xaa = Ala, Asp, Glu, Gly, Ile, Lys, Leu, Met, Asn, Pro, Gln, Arg, Ser, Thr, Val or Tyr
  MOD_RES (34)...(34): Xaa = Ala, Asp, Glu, Phe, Gly, His, Ile, Lys, Leu, Met, Asn, Gln, Ser, Thr or Val
  MOD_RES (35)...(35): Xaa = Glu, Phe, Gly, His, Ile, Lys, Leu, Met, Asn, Pro, Gln, Arg, Ser, Thr or Trp
  MOD_RES (36)...(36): Xaa = Ala, Asp, Glu, Phe, Gly, His, Lys, Leu, Met, Asn, Pro, Gln, Arg, Ser, Thr, Val or Tyr
  MOD_RES (37)...(37): Xaa = Ala, Asp, Glu, Phe, Gly, His, Ile, Lys, Met, Asn, Gln, Arg, Ser, Thr, Val or Tyr
CXXXXXCXXXXXCXXXXXXXXXCXCXXXXXXXXXXXXC

SEQ ID NO: 318 - protein, 35 aa, Artificial Sequence
  EGF domain monomer sequence
  MOD_RES (2)...(2): Xaa = Ala, Asp, Glu, Phe, Gly, Ile, Lys, Leu, Met, Asn, Pro, Gln, Arg, Ser, Thr, Val or Tyr
  MOD_RES (3)...(3): Xaa = Ala, Asp, Glu, Phe, Gly, His, Ile, Lys, Leu, Met, Asn, Pro, Gln, Arg, Ser, Thr, Val or Tyr
  MOD_RES (4)...(4): Xaa = Ala, Asp, Glu, Phe, Gly, His, Ile, Lys, Leu, Met, Asn, Pro, Gln, Arg, Ser, Thr, Val or Trp
  MOD_RES (5)...(5): Xaa = Ala, Asp, Glu, Phe, Gly, His, Ile, Lys, Leu, Met, Asn, Pro, Gln, Arg, Ser, Thr or Val
  MOD_RES (6)...(6): Xaa = Ala, Asp, Glu, Phe, Gly, His, Ile, Lys, Leu, Asn, Pro, Gln, Arg, Ser, Val or Tyr
  MOD_RES (7)...(7): Xaa = Ala, Asp, Glu, Gly, Ile, Lys, Leu, Met, Asn, Pro, Gln, Arg, Ser, Thr, Val or Tyr
  MOD_RES (9)...(9): Xaa = Ala, Cys, Asp, Glu, Phe, Gly, His, Lys, Leu, Met, Asn, Pro, Gln, Arg, Ser, Val or Tyr
  MOD_RES (10)...(10): Xaa = Ala, Asp, Glu, Gly, His, Ile, Lys, Leu, Met, Asn, Pro, Gln, Arg, Ser, Thr, Val or Tyr
  MOD_RES (11)...(11): Xaa = Ala, Asp, Glu, Phe, Gly, His, Lys, Leu, Asn, Gln, Arg, Ser, Thr or Tyr
  MOD_RES (12)...(12): Xaa = Ala, Phe, Gly, His, Gln, Ser, Thr or Val
  MOD_RES (13)...(13): Xaa = Ala, Asp, Glu, Phe, His, Ile, Lys, Leu, Met, Asn, Gln, Arg, Ser, Thr or Val
  MOD_RES (15)...(15): Xaa = Ala, Asp, Phe, His, Ile, Lys, Leu, Met, Asn, Gln, Arg, Ser, Thr, Val or Tyr
  MOD_RES (16)...(16): Xaa = Ala, Asp, Glu, Phe, His, Leu, Met, Asn, Pro, Gln, Arg, Ser, Val or Tyr
  MOD_RES (17)...(17): Xaa = Ala, Asp, Glu, Phe, Gly, His, Leu, Asn, Arg, Ser, Thr, Val or Tyr
  MOD_RES (18)...(18): Xaa = Ala, Asp, Glu, Gly, Asn, Pro, Gln, Arg, Ser or Thr
  MOD_RES (19)...(19): Xaa = Ala, Asp, Glu, Phe, Gly, Lys, Leu, Asn, Pro, Gln, Arg, Ser or Thr
  MOD_RES (20)...(20): Xaa = Ala, Asp, Glu, Gly, Met, Asn, Arg, Ser, Thr, Val or Tyr
  MOD_RES (21)...(21): Xaa = Ala, Asp, Glu, Gly, Lys, Leu, Met, Gln, Arg, Ser or Thr
  MOD_RES (22)...(22): Xaa = Phe, His, Ile, Pro, Arg, Val, Trp or Tyr
  MOD_RES (23)...(23): Xaa = Ala, Glu, His, Lys, Leu, Gln, Ser, Thr, Val or Tyr
  MOD_RES (25)...(25): Xaa = Ala, Asp, Glu, Phe, Gly, His, Ile, Lys, Leu, Met, Asn, Pro, Gln, Arg, Ser, Thr, Val, Trp or Tyr
  MOD_RES (27)...(27): Xaa = Ala, Asp, Glu, Phe, His, Lys, Leu, Met, Asn, Pro, Gln, Arg, Ser, Thr, Val, Trp or Tyr
  MOD_RES (28)...(28): Xaa = Ala, Asp, Glu, Phe, Gly, His, Lys, Leu, Asn, Pro, Gln, Arg, Ser, Thr, Val or Tyr
  MOD_RES (29)...(29): Xaa = Ala, Glu, Gly, His, Lys, Leu, Asn, Pro, Arg, Ser, Thr or Tyr
  MOD_RES (30)...(30): Xaa = Phe, His, Ile, Leu, Met, Arg, Thr, Trp or Tyr
  MOD_RES (31)...(31): Xaa = Ala, Asp, Glu, Phe, Gly, His, Ile, Lys, Leu, Met, Asn, Gln, Arg, Ser, Thr, Val or Tyr
  MOD_RES (32)...(32): Xaa = Asp, Gly or Ser
  MOD_RES (33)...(33): Xaa = Ala, Asp, Glu, Phe, His, Ile, Lys, Leu, Asn, Pro, Gln, Arg, Ser, Thr, Val or Tyr
  MOD_RES (34)...(34): Xaa = Ala, Asp, Glu, Phe, His, Ile, Lys, Leu, Met, Asn, Gln, Arg, Ser, Thr or Tyr
CXXXXXXCXXXXXCXXXXXXXXXCXCXXXXXXXXC

SEQ ID NO: 319 - protein, 36 aa, Artificial Sequence
  EGF domain monomer sequence
  MOD_RES (2)...(2): Xaa = Ala, Asp, Glu, Phe, Gly, Ile, Lys, Leu, Met, Asn, Pro, Gln, Arg, Ser, Thr, Val or Tyr
  MOD_RES (3)...(3): Xaa = Ala, Asp, Glu, Phe, Gly, His, Ile, Lys, Leu, Met, Asn, Pro, Gln, Arg, Ser, Thr, Val or Tyr
  MOD_RES (4)...(4): Xaa = Ala, Asp, Glu, Phe, Gly, His, Ile, Lys, Leu, Met, Asn, Pro, Gln, Arg, Ser, Thr, Val or Trp
  MOD_RES (5)...(5): Xaa = Ala, Asp, Glu, Phe, Gly, His, Ile, Lys, Leu, Met, Asn, Pro, Gln, Arg, Ser, Thr or Val
  MOD_RES (6)...(6): Xaa = Ala, Asp, Glu, Phe, Gly, His, Ile, Lys, Leu, Asn, Pro, Gln, Arg, Ser, Val or Tyr
  MOD_RES (7)...(7): Xaa = Ala, Asp, Glu, Gly, Ile, Lys, Leu, Met, Asn, Pro, Gln, Arg, Ser, Thr, Val or Tyr
  MOD_RES (9)...(9): Xaa = Ala, Cys, Asp, Glu, Phe, Gly, His, Lys, Leu, Met, Asn, Pro, Gln, Arg, Ser, Val or Tyr
  MOD_RES (10)...(10): Xaa = Ala, Asp, Glu, Gly, His, Ile, Lys, Leu, Met, Asn, Pro, Gln, Arg, Ser, Thr, Val or Tyr
  MOD_RES (11)...(11): Xaa = Ala, Asp, Glu, Phe, Gly, His, Lys, Leu, Asn, Gln, Arg, Ser, Thr or Tyr
  MOD_RES (12)...(12): Xaa = Ala, Phe, Gly, His, Gln, Ser, Thr or Val
  MOD_RES (13)...(13): Xaa = Ala, Asp, Glu, Phe, His, Ile, Lys, Leu, Met, Asn, Gln, Arg, Ser, Thr or Val
  MOD_RES (15)...(15): Xaa = Ala, Asp, Phe, His, Ile, Lys, Leu, Met, Asn, Gln, Arg, Ser, Thr, Val or Tyr
  MOD_RES (16)...(16): Xaa = Ala, Asp, Glu, Phe, His, Leu, Met, Asn, Pro, Gln, Arg, Ser, Val or Tyr
  MOD_RES (17)...(17): Xaa = Ala, Asp, Glu, Phe, Gly, His, Leu, Asn, Arg, Ser, Thr, Val or Tyr
  MOD_RES (18)...(18): Xaa = Ala, Asp, Glu, Gly, Asn, Pro, Gln, Arg, Ser or Thr
  MOD_RES (19)...(19): Xaa = Ala, Asp, Glu, Phe, Gly, Lys, Leu, Asn, Pro, Gln, Arg, Ser or Thr
  MOD_RES (20)...(20): Xaa = Ala, Asp, Glu, Gly, Met, Asn, Arg, Ser, Thr, Val or Tyr
  MOD_RES (21)...(21): Xaa = Ala, Asp, Glu, Gly, Lys, Leu, Met, Gln, Arg, Ser or Thr
  MOD_RES (22)...(22): Xaa = Phe, His, Ile, Pro, Arg, Val, Trp or Tyr
  MOD_RES (23)...(23): Xaa = Ala, Glu, His, Lys, Leu, Gln, Ser, Thr, Val or Tyr
  MOD_RES (25)...(25): Xaa = Ala, Asp, Glu, Phe, Gly, His, Ile, Lys, Leu, Met, Asn, Pro, Gln, Arg, Ser, Thr, Val, Trp or Tyr
  MOD_RES (27)...(27): Xaa = Ala, Asp, Glu, Phe, Gly, His, Ile, Lys, Leu, Asn, Pro, Gln, Arg, Ser, Thr, Val or Tyr
  MOD_RES (28)...(28): Xaa = Ala, Asp, Glu, Phe, His, Ile, Lys, Leu, Met, Asn, Pro, Gln, Arg, Ser, Thr or Val
  MOD_RES (29)...(29): Xaa = Asp, Glu, Gly, Asn, Pro or Ser
  MOD_RES (30)...(30): Xaa = Ala, Asp, Glu, Phe, His, Leu, Met, Gln, Arg, Ser, Thr, Trp or Tyr
  MOD_RES (31)...(31): Xaa = Ala, Asp, Glu, Phe, Gly, His, Ile, Lys, Leu, Met, Asn, Gln, Arg, Ser, Thr, Val or Tyr
  MOD_RES (32)...(32): Xaa = Ala, Phe, Gly, Ile, Lys, Leu, Met, Pro, Gln, Arg, Ser, Thr, Val, Trp or Tyr
  MOD_RES (33)...(33): Xaa = Ala, Asp, Glu, Phe, Gly, His, Lys, Leu, Met, Asn, Pro, Gln, Arg, Ser, Thr, Val or Trp
  MOD_RES (34)...(34): Xaa = Ala, Asp, Glu, Gly, Ile, Lys, Leu, Met, Asn, Pro, Gln, Arg, Ser, Thr, Val or Tyr
  MOD_RES (35)...(35): Xaa = Ala, Asp, Glu, Phe, Gly, His, Ile, Lys, Leu, Met, Asn, Gln, Ser, Thr or Val
CXXXXXXCXXXXXCXXXXXXXXXCXCXXXXXXXXXC

SEQ ID NO: 320 - protein, 37 aa, Artificial Sequence
  EGF domain monomer sequence
  MOD_RES (2)...(2): Xaa = Ala, Asp, Glu, Phe, Gly, Ile, Lys, Leu, Met, Asn, Pro, Gln, Arg, Ser, Thr, Val or Tyr
  MOD_RES (3)...(3): Xaa = Ala, Asp, Glu, Phe, Gly, His, Ile, Lys, Leu, Met, Asn, Pro, Gln, Arg, Ser, Thr, Val or Tyr
  MOD_RES (4)...(4): Xaa = Ala, Asp, Glu, Phe, Gly, His, Ile, Lys, Leu, Met, Asn, Pro, Gln, Arg, Ser, Thr, Val or Trp
  MOD_RES (5)...(5): Xaa = Ala, Asp, Glu, Phe, Gly, His, Ile, Lys, Leu, Met, Asn, Pro, Gln, Arg, Ser, Thr or Val
  MOD_RES (6)...(6): Xaa = Ala, Asp, Glu, Phe, Gly, His, Ile, Lys, Leu, Asn, Pro, Gln, Arg, Ser, Val or Tyr
  MOD_RES (7)...(7): Xaa = Ala, Asp, Glu, Gly, Ile, Lys, Leu, Met, Asn, Pro, Gln, Arg, Ser, Thr, Val or Tyr
  MOD_RES (9)...(9): Xaa = Ala, Cys, Asp, Glu, Phe, Gly, His, Lys, Leu, Met, Asn, Pro, Gln, Arg, Ser, Val or Tyr
  MOD_RES (10)...(10): Xaa = Ala, Asp, Glu, Gly, His, Ile, Lys, Leu, Met, Asn, Pro, Gln, Arg, Ser, Thr, Val or Tyr
  MOD_RES (11)...(11): Xaa = Ala, Asp, Glu, Phe, Gly, His, Lys, Leu, Asn, Gln, Arg, Ser, Thr or Tyr
  MOD_RES (12)...(12): Xaa = Ala, Phe, Gly, His, Gln, Ser, Thr or Val
  MOD_RES (13)...(13): Xaa = Ala, Asp, Glu, Phe, His, Ile, Lys, Leu, Met, Asn, Gln, Arg, Ser, Thr or Val
  MOD_RES (15)...(15): Xaa = Ala, Asp, Phe, His, Ile, Lys, Leu, Met, Asn, Gln, Arg, Ser, Thr, Val or Tyr
  MOD_RES (16)...(16): Xaa = Ala, Asp, Glu, Phe, His, Leu, Met, Asn, Pro, Gln, Arg, Ser, Val or Tyr
  MOD_RES (17)...(17): Xaa = Ala, Asp, Glu, Phe, Gly, His, Leu, Asn, Arg, Ser, Thr, Val or Tyr
  MOD_RES (18)...(18): Xaa = Ala, Asp, Glu, Gly, Asn, Pro, Gln, Arg, Ser or Thr
  MOD_RES (19)...(19): Xaa = Ala, Asp, Glu, Phe, Gly, Lys, Leu, Asn, Pro, Gln, Arg, Ser or Thr
  MOD_RES (20)...(20): Xaa = Ala, Asp, Glu, Gly, Met, Asn, Arg, Ser, Thr, Val or Tyr
  MOD_RES (21)...(21): Xaa = Ala, Asp, Glu, Gly, Lys, Leu, Met, Gln, Arg, Ser or Thr
  MOD_RES (22)...(22): Xaa = Phe, His, Ile, Pro, Arg, Val, Trp or Tyr
  MOD_RES (23)...(23): Xaa = Ala, Glu, His, Lys, Leu, Gln, Ser, Thr, Val or Tyr
  MOD_RES (25)...(25): Xaa = Ala, Asp, Glu, Phe, Gly, His, Ile, Lys, Leu, Met, Asn, Pro, Gln, Arg, Ser, Thr, Val, Trp or Tyr
  MOD_RES (27)...(27): Xaa = Ala, Asp, Glu, Phe, Gly, His, Ile, Lys, Leu, Asn, Pro, Gln, Arg, Ser, Thr, Val or Tyr
  MOD_RES (28)...(28): Xaa = Ala, Asp, Glu, Phe, His, Ile, Lys, Leu, Met, Asn, Pro, Gln, Arg, Ser, Thr or Val
  MOD_RES (29)...(29): Xaa = Asp, Glu, Gly, Asn, Pro or Ser
  MOD_RES (30)...(30): Xaa = Ala, Asp, Glu, Phe, His, Leu, Met, Gln, Arg, Ser, Thr, Trp or Tyr
  MOD_RES (31)...(31): Xaa = Ala, Asp, Glu, Phe, Gly, His, Ile, Lys, Leu, Met, Asn, Gln, Arg, Ser, Thr, Val or Tyr
  MOD_RES (32)...(32): Xaa = Ala, Phe, Gly, Ile, Lys, Leu, Met, Pro, Gln, Arg, Ser, Thr, Val, Trp or Tyr
  MOD_RES (33)...(33): Xaa = Ala, Asp, Glu, Phe, Gly, His, Lys, Leu, Met, Asn, Pro, Gln, Arg, Ser, Thr, Val or Trp
  MOD_RES (34)...(34): Xaa = Ala, Asp, Glu, Gly, Ile, Lys, Leu, Met, Asn, Pro, Gln, Arg, Ser, Thr, Val or Tyr
  MOD_RES (35)...(35): Xaa = Ala, Asp, Glu, Phe, Gly, His, Ile, Lys, Leu, Met, Asn, Gln, Ser, Thr or Val
  MOD_RES (36)...(36): Xaa = Glu, Phe, Gly, His, Ile, Lys, Leu, Met, Asn, Pro, Gln, Arg, Ser, Thr or Trp
CXXXXXXCXXXXXCXXXXXXXXXCXCXXXXXXXXXXC

SEQ ID NO: 321 - protein, 38 aa, Artificial Sequence
  EGF domain monomer sequence
  MOD_RES (2)...(2): Xaa = Ala, Asp, Glu, Phe, Gly, Ile, Lys, Leu, Met, Asn, Pro, Gln, Arg, Ser, Thr, Val or Tyr
  MOD_RES (3)...(3): Xaa = Ala, Asp, Glu, Phe, Gly, His, Ile, Lys, Leu, Met, Asn, Pro, Gln, Arg, Ser, Thr, Val or Tyr
  MOD_RES (4)...(4): Xaa = Ala, Asp, Glu, Phe, Gly, His, Ile, Lys, Leu, Met, Asn, Pro, Gln, Arg, Ser, Thr, Val or Trp
  MOD_RES (5)...(5): Xaa = Ala, Asp, Glu, Phe, Gly, His, Ile, Lys, Leu, Met, Asn, Pro, Gln, Arg, Ser, Thr or Val
  MOD_RES (6)...(6): Xaa = Ala, Asp, Glu, Phe, Gly, His, Ile, Lys, Leu, Asn, Pro, Gln, Arg, Ser, Val or Tyr
  MOD_RES (7)...(7): Xaa = Ala, Asp, Glu, Gly, Ile, Lys, Leu, Met, Asn, Pro, Gln, Arg, Ser, Thr, Val or Tyr
  MOD_RES (9)...(9): Xaa = Ala, Cys, Asp, Glu, Phe, Gly, His, Lys, Leu, Met, Asn, Pro, Gln, Arg, Ser, Val or Tyr
  MOD_RES (10)...(10): Xaa = Ala, Asp, Glu, Gly, His, Ile, Lys, Leu, Met, Asn, Pro, Gln, Arg, Ser, Thr, Val or Tyr
  MOD_RES (11)...(11): Xaa = Ala, Asp, Glu, Phe, Gly, His, Lys, Leu, Asn, Gln, Arg, Ser, Thr or Tyr
  MOD_RES (12)...(12): Xaa = Ala, Phe, Gly, His, Gln, Ser, Thr or Val
  MOD_RES (13)...(13): Xaa = Ala, Asp, Glu, Phe, His, Ile, Lys, Leu, Met, Asn, Gln, Arg, Ser, Thr or Val
  MOD_RES (15)...(15): Xaa = Ala, Asp, Phe, His, Ile, Lys, Leu, Met, Asn, Gln, Arg, Ser, Thr, Val or Tyr
  MOD_RES (16)...(16): Xaa = Ala, Asp, Glu, Phe, His, Leu, Met, Asn, Pro, Gln, Arg, Ser, Val or Tyr
  MOD_RES (17)...(17): Xaa = Ala, Asp, Glu, Phe, Gly, His, Leu, Asn, Arg, Ser, Thr, Val or Tyr
  MOD_RES (18)...(18): Xaa = Ala, Asp, Glu, Gly, Asn, Pro, Gln, Arg, Ser or Thr
  MOD_RES (19)...(19): Xaa = Ala, Asp, Glu, Phe, Gly, Lys, Leu, Asn, Pro, Gln, Arg, Ser or Thr
  MOD_RES (20)...(20): Xaa = Ala, Asp, Glu, Gly, Met, Asn, Arg, Ser, Thr, Val or Tyr
  MOD_RES (21)...(21): Xaa = Ala, Asp, Glu, Gly, Lys, Leu, Met, Gln, Arg, Ser or Thr
  MOD_RES (22)...(22): Xaa = Phe, His, Ile, Pro, Arg, Val, Trp or Tyr
  MOD_RES (23)...(23): Xaa = Ala, Glu, His, Lys, Leu, Gln, Ser, Thr, Val or Tyr
  MOD_RES (25)...(25): Xaa = Ala, Asp, Glu, Phe, Gly, His, Ile, Lys, Leu, Met, Asn, Pro, Gln, Arg, Ser, Thr, Val, Trp or Tyr
  MOD_RES (27)...(27): Xaa = Ala, Asp, Glu, Phe, Gly, His, Ile, Lys, Leu, Asn, Pro, Gln, Arg, Ser, Thr, Val or Tyr
  MOD_RES (28)...(28): Xaa = Ala, Asp, Glu, Phe, His, Ile, Lys, Leu, Met, Asn, Pro, Gln, Arg, Ser, Thr or Val
  MOD_RES (29)...(29): Xaa = Asp, Glu, Gly, Asn, Pro or Ser
  MOD_RES (30)...(30): Xaa = Ala, Asp, Glu, Phe, His, Leu, Met, Gln, Arg, Ser, Thr, Trp or Tyr
  MOD_RES (31)...(31): Xaa = Ala, Asp, Glu, Phe, Gly, His, Ile, Lys, Leu, Met, Asn, Gln, Arg, Ser, Thr, Val or Tyr
  MOD_RES (32)...(32): Xaa = Ala, Phe, Gly, Ile, Lys, Leu, Met, Pro, Gln, Arg, Ser, Thr, Val, Trp or Tyr
  MOD_RES (33)...(33): Xaa = Ala, Asp, Glu, Phe, Gly, His, Lys, Leu, Met, Asn, Pro, Gln, Arg, Ser, Thr, Val or Trp
  MOD_RES (34)...(34): Xaa = Ala, Asp, Glu, Gly, Ile, Lys, Leu, Met, Asn, Pro, Gln, Arg, Ser, Thr, Val or Tyr
  MOD_RES (35)...(35): Xaa = Ala, Asp, Glu, Phe, Gly, His, Ile, Lys, Leu, Met, Asn, Gln, Ser, Thr or Val
  MOD_RES (36)...(36): Xaa = Glu, Phe, Gly, His, Ile, Lys, Leu, Met, Asn, Pro, Gln, Arg, Ser, Thr or Trp
  MOD_RES (37)...(37): Xaa = Ala, Asp, Glu, Phe, Gly, His, Lys, Leu, Met, Asn, Pro, Gln, Arg, Ser, Thr, Val or Tyr
CXXXXXXCXXXXXCXXXXXXXXXCXCXXXXXXXXXXXC

SEQ ID NO: 322 - protein, 39 aa, Artificial Sequence
  EGF domain monomer sequence
  MOD_RES (2)...(2): Xaa = Ala, Asp, Glu, Phe, Gly, Ile, Lys, Leu, Met, Asn, Pro, Gln, Arg, Ser, Thr, Val or Tyr
  MOD_RES (3)...(3): Xaa = Ala, Asp, Glu, Phe, Gly, His, Ile, Lys, Leu, Met, Asn, Pro, Gln, Arg, Ser, Thr, Val or Tyr
  MOD_RES (4)...(4): Xaa = Ala, Asp, Glu, Phe, Gly, His, Ile, Lys, Leu, Met, Asn, Pro, Gln, Arg, Ser, Thr, Val or Trp
  MOD_RES (5)...(5): Xaa = Ala, Asp, Glu, Phe, Gly, His, Ile, Lys, Leu, Met, Asn, Pro, Gln, Arg, Ser, Thr or Val
  MOD_RES (6)...(6): Xaa = Ala, Asp, Glu, Phe, Gly, His, Ile, Lys, Leu, Asn, Pro, Gln, Arg, Ser, Val or Tyr
  MOD_RES (7)...(7): Xaa = Ala, Asp, Glu, Gly, Ile, Lys, Leu, Met, Asn, Pro, Gln, Arg, Ser, Thr, Val or Tyr
  MOD_RES (9)...(9): Xaa = Ala, Cys, Asp, Glu, Phe, Gly, His, Lys, Leu, Met, Asn, Pro, Gln, Arg, Ser, Val or Tyr
  MOD_RES (10)...(10): Xaa = Ala, Asp, Glu, Gly, His, Ile, Lys, Leu, Met, Asn, Pro, Gln, Arg, Ser, Thr, Val or Tyr
  MOD_RES (11)...(11): Xaa = Ala, Asp, Glu, Phe, Gly, His, Lys, Leu, Asn, Gln, Arg, Ser, Thr or Tyr
  MOD_RES (12)...(12): Xaa = Ala, Phe, Gly, His, Gln, Ser, Thr or Val
  MOD_RES (13)...(13): Xaa = Ala, Asp, Glu, Phe, His, Ile, Lys, Leu, Met, Asn, Gln, Arg, Ser, Thr or Val
  MOD_RES (15)...(15): Xaa = Ala, Asp, Phe, His, Ile, Lys, Leu, Met, Asn, Gln, Arg, Ser, Thr, Val or Tyr
  MOD_RES (16)...(16): Xaa = Ala, Asp, Glu, Phe, His, Leu, Met, Asn, Pro, Gln, Arg, Ser, Val or Tyr
  MOD_RES (17)...(17): Xaa = Ala, Asp, Glu, Phe, Gly, His, Leu, Asn, Arg, Ser, Thr, Val or Tyr
  MOD_RES (18)...(18): Xaa = Ala, Asp, Glu, Gly, Asn, Pro, Gln, Arg, Ser or Thr
  MOD_RES (19)...(19): Xaa = Ala, Asp, Glu, Phe, Gly, Lys, Leu, Asn, Pro, Gln, Arg, Ser or Thr
  MOD_RES (20)...(20): Xaa = Ala, Asp, Glu, Gly, Met, Asn, Arg, Ser, Thr, Val or Tyr
  MOD_RES (21)...(21): Xaa = Ala, Asp, Glu, Gly, Lys, Leu, Met, Gln, Arg, Ser or Thr
  MOD_RES (22)...(22): Xaa = Phe, His, Ile, Pro, Arg, Val, Trp or Tyr
  MOD_RES (23)...(23): Xaa = Ala, Glu, His, Lys, Leu, Gln, Ser, Thr, Val or Tyr
  MOD_RES (25)...(25): Xaa = Ala, Asp, Glu, Phe, Gly, His, Ile, Lys, Leu, Met, Asn, Pro, Gln, Arg, Ser, Thr, Val, Trp or Tyr
  MOD_RES (27)...(27): Xaa = Ala, Asp, Glu, Phe, Gly, His, Ile, Lys, Leu, Asn, Pro, Gln, Arg, Ser, Thr, Val or Tyr
  MOD_RES (28)...(28): Xaa = Ala, Asp, Glu, Phe, His, Ile, Lys, Leu, Met, Asn, Pro, Gln, Arg, Ser, Thr or Val
  MOD_RES (29)...(29): Xaa = Asp, Glu, Gly, Asn, Pro or Ser
  MOD_RES (30)...(30): Xaa = Ala, Asp, Glu, Phe, His, Leu, Met, Gln, Arg, Ser, Thr, Trp or Tyr
  MOD_RES (31)...(31): Xaa = Ala, Asp, Glu, Phe, Gly, His, Ile, Lys, Leu, Met, Asn, Gln, Arg, Ser, Thr, Val or Tyr
  MOD_RES (32)...(32): Xaa = Ala, Phe, Gly, Ile, Lys, Leu, Met, Pro, Gln, Arg, Ser, Thr, Val, Trp or Tyr
  MOD_RES (33)...(33): Xaa = Ala, Asp, Glu, Phe, Gly, His, Lys, Leu, Met, Asn, Pro, Gln, Arg, Ser, Thr, Val or Trp
  MOD_RES (34)...(34): Xaa = Ala, Asp, Glu, Gly, Ile, Lys, Leu, Met, Asn, Pro, Gln, Arg, Ser, Thr, Val or Tyr
  MOD_RES (35)...(35): Xaa = Ala, Asp, Glu, Phe, Gly, His, Ile, Lys, Leu, Met, Asn, Gln, Ser, Thr or Val
  MOD_RES (36)...(36): Xaa = Glu, Phe, Gly, His, Ile, Lys, Leu, Met, Asn, Pro, Gln, Arg, Ser, Thr or Trp
  MOD_RES (37)...(37): Xaa = Ala, Asp, Glu, Phe, Gly, His, Lys, Leu, Met, Asn, Pro, Gln, Arg, Ser, Thr, Val or Tyr
  MOD_RES (38)...(38): Xaa = Ala, Asp, Glu, Phe, Gly, His, Ile, Lys, Met, Asn, Gln, Arg, Ser, Thr, Val or Tyr
CXXXXXXCXXXXXCXXXXXXXXXCXCXXXXXXXXXXXXC

SEQ ID NO: 323 - protein, 6 aa, Artificial Sequence
  affinity peptide
SKVILF

SEQ ID NO: 324 - protein, 35 aa, Artificial Sequence
  LDL-receptor A domain consensus
  MOD_RES (1)...(35): Xaa = any amino acid
  DISULFID (1)...(13)
  DISULFID (8)...(26)
  DISULFID (20)...(35)
CXXXXFXCXXGXCIXXXXXCDGXXDCXDXSDEXXC

SEQ ID NO: 325 - protein, 35 aa, Artificial Sequence
  conserved amino acids in an A-domain
  MOD_RES (2)...(5): Xaa = any amino acid
  MOD_RES (6)...(6): Xaa = hydrophobic amino acid
  MOD_RES (7)...(7): Xaa = any amino acid
  MOD_RES (9)...(12): Xaa = any amino acid
  MOD_RES (14)...(14): Xaa = hydrophobic amino acid
  MOD_RES (15)...(17): Xaa = any amino acid
  MOD_RES (18)...(18): Xaa = hydrophobic amino acid
  MOD_RES (19)...(19): Xaa = any amino acid
  MOD_RES (21)...(21): Xaa = negatively charged amino acid
  MOD_RES (22)...(24): Xaa = any amino acid
  MOD_RES (25)...(25): Xaa = negatively charged amino acid
  MOD_RES (27)...(30): Xaa = any amino acid
  MOD_RES (31)...(32): Xaa = negatively charged amino acid
  MOD_RES (33)...(34): Xaa = any amino acid
  DISULFID (1)...(13)
  DISULFID (8)...(26)
  DISULFID (20)...(35)
CXXXXXXCXXXXCXXXXXXCXXXXXCXXXXXXXXC

SEQ ID NO: 326 - protein, 41 aa, Artificial Sequence
  A domain
  MOD_RES (2)...(2): Xaa = Val, Leu, Gly, Pro, Ala, Glu, Gln or Arg
  MOD_RES (3)...(3): Xaa = Ala, Pro or Ser
  MOD_RES (4)...(4): Xaa = Asp, Asn, Gly or Ser
  MOD_RES (7)...(7): Xaa = Thr, Pro, Arg, Lys or Gln
  MOD_RES (9)...(9): Xaa = Gly, Ser, Asp, Glu, Asn, Lys or Arg
  MOD_RES (10)...(10): Xaa = Asn or Ser
  MOD_RES (12)...(12): Xaa = His, Gln or Arg
  MOD_RES (15)...(15): Xaa = Pro or Ser
  MOD_RES (16)...(16): Xaa = Val, Leu, Gly, Pro, Ala, Glu, Gln or Arg
  MOD_RES (17)...(17): Xaa = Ala, Ser, Glu, Asn, His or Arg
  MOD_RES (18)...(18): Xaa = Leu or Trp
  MOD_RES (19)...(19): Xaa = Leu, Val, Gly or Arg
  MOD_RES (23)...(23): Xaa = Val, Asp or Glu
  MOD_RES (24)...(24): Xaa = Pro, Asn or Asp
  MOD_RES (27)...(27): Xaa = Ala, Pro, Gly, Glu, Gln or Arg
  MOD_RES (29)...(29): Xaa = Asn or Gly
  MOD_RES (33)...(33): Xaa = Leu, Val, Met, Glu, Gln or Lys
  MOD_RES (34)...(34): Xaa = Gly, Ser, Asn or Asp
  MOD_RES (36)...(36): Xaa = Ala, Pro, Thr, Gln, Glu or Lys
  MOD_RES (37)...(38): Xaa = Ala, Asp, Glu, Gly, His, Ile, Lys, Leu, Asn, Pro, Gln, Arg, Ser, Thr or Val
  MOD_RES (39)...(39): Xaa = Ser, Gly or Arg
  MOD_RES (40)...(40): Xaa = His, Pro or Arg
CXXXZFXCXXGXCIXXXXXCDGXXDCXDXSDEXXCXXXXXT

SEQ ID NO: 327 - protein, 35 aa, Artificial Sequence; identical to SEQ ID NO: 325
  A domain
  MOD_RES (1)...(35): Xaa = any amino acid

SEQ ID NO: 328 - protein, 35 aa, Artificial Sequence
  DA4/1 selected clone 1
CRADQFKCENGQCIPARLRCDGDPDCPDNSDELNC

SEQ ID NO: 329 - protein, 35 aa, Artificial Sequence
  DH3/2 selected clone 2
CLADQFTCKNGHCIPRAWLCDGVGDCPDDSDEVGC

SEQ ID NO: 330 - protein, 27 aa, Artificial Sequence
  A domain typical consensus sequence representing portion beginning at third Cys
  MOD_RES (2)...(2): Xaa = Val, Ile, Leu, Met or Ala
  MOD_RES (3)...(7): Xaa = any amino acid
  MOD_RES (9)...(9): Xaa = Asp, Asn or His
  MOD_RES (10)...(12): Xaa = any amino acid
  MOD_RES (13)...(13): Xaa = Asp, Glu, Asn, Gln, His or Thr
  MOD_RES (15)...(18): Xaa = any amino acid, Xaa at position 18 may be present or absent
  MOD_RES (19)...(19): Xaa = Ser, Thr, Ala, Asp or Glu
  MOD_RES (20)...(20): Xaa = Asp, Glu or His
  MOD_RES (21)...(21): Xaa = Asp or Glu
  MOD_RES (22)...(26): Xaa = any amino acid, Xaa at positions 23-26 may be present or absent
CXXXXXXCXXXXXCXXXXXXXXXXXXC

SEQ ID NO: 331 - protein, 64 aa, Artificial Sequence; identical to SEQ ID NO: 219
  A domain second consensus sequence spanning all six Cys residues
  MOD_RES (2)...(16): Xaa = any amino acid, Xaa at positions 4-16 may be present or absent
  MOD_RES (18)...(32): Xaa = any amino acid, Xaa at positions 22-32 may be present or absent
  MOD_RES (34)...(40): Xaa = any amino acid, Xaa at position 40 may be present or absent
  MOD_RES (43)...(45): Xaa = any amino acid, Xaa at position 18 may be present or absent
  MOD_RES (46)...(46): Xaa = Asp, Glu, Asn, Gln, His, Ser or Thr
  MOD_RES (48)...(53): Xaa = any amino acid, Xaa at positions 52 and 53 may be present or absent
  MOD_RES (56)...(63): Xaa = any amino acid, Xaa at positions 58-63 may be present or absent

SEQ ID NO: 332 - protein, 123 aa, Artificial Sequence
  exemplary C2 domain
YSHKFTVVVLRATKVTKGAFGDMLDTPDPYVELFISTTPDSRKRTRHFNNDINPVWNETFEFILDPNQENVLEITLMDANYVMDETLGTATFTVSSMKVGEKKEVPFIFNQVTEMVLEMSLEV

SEQ ID NO: 333 - protein, 5 aa, Artificial Sequence
  peptide linker repeat
GGGGS

SEQ ID NO: 334 - protein, 15 aa, Artificial Sequence
  15mer peptide linker
GGGGSGGGGSGGGGS

SEQ ID NO: 335 - protein, 5 aa, Artificial Sequence
  simple linker repeated an unspecified number of times
GGGGS

SEQ ID NO: 336 - protein, 25 aa, Artificial Sequence
  flexible peptide linker, 1-25 Gly residues
  MOD_RES (2)...(25): Gly at positions 2-25 may be present or absent
GGGGGGGGGGGGGGGGGGGGGGGGG

SEQ ID NO: 337 - protein, 20 aa, Artificial Sequence
  flexible peptide linker, 5-20 Gly residues
  MOD_RES (6)...(20): Gly at positions 6-20 may be present or absent
GGGGGGGGGGGGGGGGGGGG

SEQ ID NO: 338 - protein, 15 aa, Artificial Sequence
  flexible peptide linker, 5-15 Gly residues
  MOD_RES (6)...(15): Gly at positions 6-15 may be present or absent
GGGGGGGGGGGGGGG

SEQ ID NO: 339 - protein, 12 aa, Artificial Sequence
  flexible peptide linker, 8-12 Gly residues
  MOD_RES (9)...(12): Gly at positions 9-12 may be present or absent
GGGGGGGGGGGG

SEQ ID NO: 340 - protein, 17 aa, Artificial Sequence
  specific peptide linker
  MOD_RES (2)...(5): Gly at positions 2-5 may be present or absent
  MOD_RES (6)...(6): Xaa = Ala, Val, Leu, Ile, Met, Phe, Trp, Pro, Gly, Ser, Thr, Cys, Tyr, Asn, Gln, Lys, Arg, His, Asp or Glu
  MOD_RES (8)...(11): Gly at positions 8-11 may be present or absent
  MOD_RES (12)...(12): Xaa = Ala, Val, Leu, Ile, Met, Phe, Trp, Pro, Gly, Ser, Thr, Cys, Tyr, Asn, Gln, Lys, Arg, His, Asp or Glu
  MOD_RES (14)...(17): Gly at positions 8-11 may be present or absent
GGGGGXGGGGGXGGGGG

SEQ ID NO: 341 - protein, 17 aa, Artificial Sequence
  specific peptide linker
  MOD_RES (2)...(5): Gly at positions 2-5 may be present or absent
  MOD_RES (6)...(6): Xaa = Ser, Ala or Thr
  MOD_RES (8)...(11): Gly at positions 8-11 may be present or absent
  MOD_RES (12)...(12): Xaa = Ser, Ala or Thr
  MOD_RES (14)...(17): Gly at positions 8-11 may be present or absent
GGGGGXGGGGGXGGGGG

SEQ ID NO: 342 - protein, 17 aa, Artificial Sequence
  specific peptide linker
  MOD_RES (2)...(5): Gly at positions 2-5 may be present or absent
  MOD_RES (8)...(11): Gly at positions 8-11 may be present or absent
  MOD_RES (14)...(17): Gly at positions 8-11 may be present or absent
GGGGGSGGGGGSGGGGG

SEQ ID NO: 343 - protein, 11 aa, Artificial Sequence
  peptide linker
  MOD_RES (4)...(4): Xaa = Ala, Val, Leu, Ile, Met, Phe, Trp, Pro, Gly, Ser, Thr, Cys, Tyr, Asn, Gln, Lys, Arg, His, Asp or Glu
  MOD_RES (8)...(8): Xaa = Ala, Val, Leu, Ile, Met, Phe, Trp, Pro, Gly, Ser, Thr, Cys, Tyr, Asn, Gln, Lys, Arg, His, Asp or Glu
GGGXGGGXGGG

SEQ ID NO: 344 - protein, 11 aa, Artificial Sequence
  peptide linker
  MOD_RES (4)...(4): Xaa = Ser, Ala or Thr
  MOD_RES (8)...(8): Xaa = Ser, Ala or Thr
GGGXGGGXGGG

SEQ ID NO: 345 - protein, 11 aa, Artificial Sequence
  peptide linker
GGGSGGGSGGG

SEQ ID NO: 346 - protein, 25 aa, Artificial Sequence
  specific peptide linker
  MOD_RES (2)...(12): Gly at positions 2-12 may be present or absent
  MOD_RES (15)...(25): Gly at positions 15-25 may be present or absent
GGGGGGGGGGGGCGGGGGGGGGGGG

SEQ ID NO: 347 - protein, 11 aa, Artificial Sequence
  peptide linker
GGGGGCGGGGG

SEQ ID NO: 348 - protein, 25 aa, Artificial Sequence
  specific proline-containing peptide linker
  MOD_RES (2)...(12): Pro at positions 2-12 may be present or absent
  MOD_RES (15)...(25): Pro at positions 15-25 may be present or absent
PPPPPPPPPPPPCPPPPPPPPPPPP

SEQ ID NO: 349 - protein, 11 aa, Artificial Sequence
  peptide linker
PPPPPCPPPPP

SEQ ID NO: 350 - protein, 19 aa, Artificial Sequence
  peptide linker comprising N-glycosylation site
  MOD_RES (2)...(8): Gly at positions 2-12 may be present or absent
  MOD_RES (10)...(10): Xaa = any amino acid except Pro
  MOD_RES (11)...(11): Xaa = Ser or Thr
  MOD_RES (13)...(19): Gly at positions 2-12 may be present or absent
GGGGGGGGNXXGGGGGGGG

SEQ ID NO: 351 - protein, 19 aa, Artificial Sequence
  peptide linker comprising N-glycosylation site
  MOD_RES (2)...(8): Gly at positions 2-12 may be present or absent
  MOD_RES (10)...(10): Xaa = any amino acid except Pro
  MOD_RES (13)...(19): Gly at positions 2-12 may be present or absent
GGGGGGGGNXTGGGGGGGG

SEQ ID NO: 352 - protein, 6 aa, Artificial Sequence
  A domain linker 6mer
  MOD_RES (1)...(1): Xaa = Ala, Pro, Thr, Gln, Glu or Lys
  MOD_RES (2)...(3): Xaa = any amino acid except Cys, Phe, Tyr, Trp or Met
  MOD_RES (4)...(4): Xaa = Ser, Gly or Arg
  MOD_RES (5)...(5): Xaa = His, Pro or Arg
XXXXXT

SEQ ID NO: 353 - protein, 40 aa, Artificial Sequence
  IG156 momomer domain
CLSSEFQCQSSGRCIPLAWVCDGDNDCRDDSDEKSCKPRT

SEQ ID NO: 354 - protein, 51 aa, Artificial Sequence
  RBCA monomer domain
CRSSQFQCNDSRICIPGRWRCDGDNDCQDGSDETGCGDSHILPFSTPGPST

SEQ ID NO: 355 - protein, 48 aa, Artificial Sequence
  RBCB monomer domain
CPAGEFPCKNGQCLPVTWLCDGVNDCLDGSDEKGCGRPGPGATSAPAA

SEQ ID NO: 356 - protein, 48 aa, Artificial Sequence
  RBC11 monomer domain
CPPDEFPCKNGQCIPQDWLCDGVNDCLDGSDEKDCGRPGPGATSAPAA

SEQ ID NO: 357 - protein, 41 aa, Artificial Sequence
  CSA-A8 monomer domain
CGAGQFPCKNGHCLPLNLLCDGVNDCEDNSDEPSELCKALT

SEQ ID NO: 358 - protein, 6 aa, Artificial Sequence
  6xHis
HHHHHH

SEQ ID NO: 359 - DNA, 50 bp, Artificial Sequence
  assembly PCR oligonucleotide
acactgcaatcgcgccttacggctcccgggcggatcctcccataagttca

SEQ ID NO: 360 - DNA, 72 bp, Artificial Sequence
  assembly PCR oligonucleotide
  modified_base (1)...(72): n = g, a, c or t
agctaccaaagtgacannknnknnknnknnknnknnknnknnknnknnknnkccatacgtcgaattgttcat

SEQ ID NO: 361 - DNA, 72 bp, Artificial Sequence
  assembly PCR oligonucleotide
agctaccaaagtgacaaaaggtgcttttggtgatatgttggatactccagatccatacgtcgaattgttcat

SEQ ID NO: 362 - DNA, 62 bp, Artificial Sequence
  assembly PCR oligonucleotide
  modified_base (1)...(62): n = g, a, c or t
taggaagagaacacgtcattttnnknnknnkattaaccctgtttggaacgagacctttgagt

SEQ ID NO: 363 - DNA, 62 bp, Artificial Sequence
  assembly PCR oligonucleotide
taggaagagaacacgtcattttaataatgatattaaccctgtttggaacgagacctttgagt

SEQ ID NO: 364 - DNA, 58 bp, Artificial Sequence
  assembly PCR oligonucleotide
  modified_base (1)...(58): n = g, a, c or t
ttggaaatcaccctaatgnnknnknnknnknnknnknnknnkactctaggtacagcaa

SEQ ID NO: 365 - DNA, 58 bp, Artificial Sequence
  assembly PCR oligonucleotide
ttggaaatcaccctaatggatgcaaattatgttatggacgaaactctaggtacagcaa

SEQ ID NO: 366 - DNA, 60 bp, Artificial Sequence
  assembly PCR oligonucleotide
aagaaggaagtcccatttattttcaatcaagttactgaaatggtcttagagatgtccctt

SEQ ID NO: 367 - DNA, 48 bp, Artificial Sequence
  assembly PCR oligonucleotide
tgtcactttggtagctcttaacacaactacagtgaacttatgggagga

SEQ ID NO: 368 - DNA, 51 bp, Artificial Sequence
  assembly PCR oligonucleotide
acgtgttctcttcctagaatctggagttgtactgatgaacaattcgacgta

SEQ ID NO: 369 - DNA, 62 bp, Artificial Sequence
  assembly PCR oligonucleotide
attagggtgatttccaaaacattttcttgattaggatctaatataaactcaaaggtctcgtt

SEQ ID NO: 370 - DNA, 64 bp, Artificial Sequence
  assembly PCR oligonucleotide
atgggacttccttcttttctcccactttcattgaagatacagtaaacgttgctgtacctagagt

SEQ ID NO: 371 - DNA, 67 bp, Artificial Sequence
  assembly PCR oligonucleotide
gaccgatagcttgccgattgcagtgtggccacagaggcctcgagaacttcaagggacatctctaaga

SEQ ID NO: 372 - DNA, 56 bp, Artificial Sequence
  amplification PCR oligonucleotide
acactgcaatcgcgccttacggctcaggtgctggtggttcccataagttcactgta

SEQ ID NO: 373 - DNA, 80 bp, Artificial Sequence
  amplification PCR oligonucleotide
accgatagcttgccgattgcagtcagcacctgaaccaccaccaccagaaccaccaccaccaacttcaagggacatctcta

SEQ ID NO: 374 - DNA, 227 bp, Artificial Sequence
  stop fragment Stop1
gaattcaacgctactaccattagtagaattgatgccaccttttcagctcgcgccccaaatgaaaaaatggtcaaactaaatctactcgttcgcagaattgggaatcaactgttacatggaatgaaacttccagacaccgtactttatgaatatttatgacgattccgaggcgcgcccggactacccgtatgatgttccggattatgccccgggatcctcaggtgctg

SEQ ID NO: 375 - DNA, 173 bp, Artificial Sequence
  stop fragment Stop2
caggtgctgcactcgaggccactgcggccgcatattaacgtagatttttcctcccaacgtcctgactggtataatgagccagttcttaaaatcgcataaccagtacatggtgattaaagttgaaattaaaccgtctcaagagctttgttacgttgatttgggtaatgaagctt

SEQ ID NO: 376 - DNA, 19 bp, Artificial Sequence
  amplification PCR primer
aattcaacgctactaccat

SEQ ID NO: 377 - DNA, 21 bp, Artificial Sequence
  amplification PCR primer
agcttcattacccaaatcaac

SEQ ID NO: 378 - DNA, 81 bp, Artificial Sequence
  assembly PCR oligonucleotide
cactatgcatggactcagtgtgtccgataagggcacacggtgcctacccgtatgatgttccggattatgccccgggcagta

SEQ ID NO: 379 - DNA, 84 bp, Artificial Sequence
  assembly PCR oligonucleotide
  modified_base (1)...(84): n = g, a, c or t
cgccgtcgcatmscmagykcnsagraatacawyggccgytwyygcacbkaaattsgyyagvcnsacaggtactgcccggggcat

SEQ ID NO: 380 - DNA, 84 bp, Artificial Sequence
  assembly PCR oligonucleotide
  modified_base (1)...(84): n = g, a, c or t
cgccgtcgcatmscmatkccnsagraatacawyggccgytwyygcacbkaaattsgyyagvcnsacaggtactgcccggggcat

SEQ ID NO: 381 - DNA, 79 bp, Artificial Sequence
  assembly PCR oligonucleotide
  modified_base (1)...(79): n = g, a, c or t
atgcgacggcgwwratgattgtsvagatggtagcgatgaavwgrrttgtvmavnmvnmvgccvtacgggctcggcctct

SEQ ID NO: 382 - DNA, 79 bp, Artificial Sequence
  assembly PCR oligonucleotide
  modified_base (1)...(79): n = g, a, c or t
atgcgacggcgwwccggattgtsvagatggtagcgatgaavwgrrttgtvmavnmvnmvgccvtacgggctcggcctct

SEQ ID NO: 383 - DNA, 79 bp, Artificial Sequence
  assembly PCR oligonucleotide
  modified_base (1)...(79): n = g, a, c or t
atgcgacggcgwwratgattgtsvagataacagcgatgaavwgrrttgtvmavnmvnmvgccvtacgggctcggcctct

SEQ ID NO: 384 - DNA, 79 bp, Artificial Sequence
  assembly PCR oligonucleotide
  modified_base (1)...(79): n = g, a, c or t
atgcgacggcgwwccggattgtsvagataacagcgatgaavwgrrttgtvmavnmvnmvgccvtacgggctcggcctct

SEQ ID NO: 385 - DNA, 81 bp, Artificial Sequence
  assembly PCR oligonucleotide
tcctggtagtacttatctactactatttgtctgtgtctgctctgggttcctaacggttcggccacagaggccgagcccgta

SEQ ID NO: 386 - DNA, 17 bp, Artificial Sequence
  amplification PCR oligonucleotide
aagcctcagcgaccgaa

SEQ ID NO: 387 - DNA, 18 bp, Artificial Sequence
  amplification PCR oligonucleotide
agcccaataggaacccat

SEQ ID NO: 388 - DNA, 228 bp, Artificial Sequence
  stop fragment Stop1
gaattcaacgctactaccattagtagaattgatgccaccttttcagctcgcgccccaaatgaaaaaatggtcaaactaaatctactcgttcgcagaattgggaatcaactgttacatggaatgaaacttccagacaccgtactttatgaatatttatgacgattccgaggcgcgcccggactacccgtatgatgttccggattatgccccgggcggatccagtacctg

SEQ ID NO: 389 - DNA, 176 bp, Artificial Sequence
  stop fragment Stop2
gccctacgggcctcgaggcacctggtgcggccgcatattaacgtagatttttcctcccaacgtcctgactggtataatgagccagttcttaaaatcgcataaccagtacatggtgattaaagttgaaattaaaccgtctcaagagctttgttacgttgatttgggtaatgaagctt

SEQ ID NO: 390 - DNA, 21 bp, Artificial Sequence
  amplification PCR primer
agcttcattacccaaatcaac

SEQ ID NO: 391 - DNA, 19 bp, Artificial Sequence
  amplification PCR primer
aattcaacgctactaccat

SEQ ID NO: 392 - protein, 42 aa, Artificial Sequence
  CD20 binding sequence 2
CLPDEFQCRSTGICIPLAWRCDGVNDCQDDSDETNCRATGRT

SEQ ID NO: 393 - protein, 53 aa, Artificial Sequence
  CD20 binding sequence 3
CLPGEFRCRGTSICIPPSWVCDGVDDCGDGSDEALEHCGDSHILPFSTPGPST

SEQ ID NO: 394 - protein, 51 aa, Artificial Sequence
  CD20 binding sequence 4
CQPNEFPCGSTGLCVPREWLCDGVDDCQDGSDEPDCGDSHILPFSTPGPST

SEQ ID NO: 395 - protein, 53 aa, Artificial Sequence; identical to SEQ ID NO: 393
  CD20 binding sequence 5

SEQ ID NO: 396 - protein, 42 aa, Artificial Sequence
  CD20 binding sequence 6
CRSGEFKCHGTRPCVPQRWVCDGDDDCVDGSDEKSCETPARR

SEQ ID NO: 397 - protein, 42 aa, Artificial Sequence
  CD20 binding sequence 7
CRSSQFKCHNTRPCIPGRWVCDGVNDCLDGSDEANCRRAARR

SEQ ID NO: 398 - protein, 42 aa, Artificial Sequence
  CD20 binding sequence 8
CLPERFQCAVPGYCIPLPGVCDGVNDCQEDSDEPNCRAPGLR

SEQ ID NO: 399 - protein, 48 aa, Artificial Sequence
  CD20 binding sequence 9
CRRNEFRCKSGHCVPQPLVCDGVRDCEDNSDEPSCGRPGPGATSAPAA

SEQ ID NO: 400 - protein, 48 aa, Artificial Sequence
  CD20 binding sequence 10
CRAGEFPCKNGQCLPVTWLCDGVNDCLDGSDEKGCGRPGPGATSAPAA

SEQ ID NO: 401 - protein, 48 aa, Artificial Sequence
  CD20 binding sequence 11
CPSNEFTCKSGHCVPQPFVCDGVPDCEDNSDETSCGRPGPGATSAPAA

SEQ ID NO: 402 - protein, 49 aa, Artificial Sequence
  CD20 binding sequence 14
CRASEFPCRGTGTCIPRHWLCDGENDCADSSDEKDCGRPGPGATSAPAA

SEQ ID NO: 403 - protein, 49 aa, Artificial Sequence
  CD20 binding sequence 15
CPPDEFRCKSYKRCVPLAFVCDGVDDCEDGSDEEGCGRPGPGATSAPAA

SEQ ID NO: 404 - protein, 42 aa, Artificial Sequence; identical to SEQ ID NO: 392
  CD20 binding sequence 1

SEQ ID NO: 405 - protein, 44 aa, Artificial Sequence
  CD20 binding sequence 6
CPAGEFQCGNGQCIPATWLCDGVNDCLDNSDETGCSQDPEFHKV

SEQ ID NO: 406 - protein, 42 aa, Artificial Sequence
  CD20 binding sequence CC3
CPASQFKCHNTRTCIPRRWVCDGVNDCLDGSDEANCRRAAPT

SEQ ID NO: 407 - protein, 12 aa, Artificial Sequence
  repeated Gly-Gly-Ser linker
GGSGGSGGSGGS

SEQ ID NO: 408 - protein, 43 aa, Artificial Sequence
  TPO-R binding sequence T4690 (TPO1)
CHSTGEFRCRSSGICVSPTWVCDGENDCLDGSDEASCTAAGPT

SEQ ID NO: 409 - protein, 49 aa, Artificial Sequence
  TPO-R binding sequence T5 (TPO2)
CPPSEFRCNSGQCIPREWRCDGDNDCADNSDEESCSAPASEPPGSLSLQ

SEQ ID NO: 410 - protein, 44 aa, Artificial Sequence
  TPO-R binding sequence T2 (TPO9)
CLPSEFRCSSGHCIPRRWRCDGEPDCQDGSDEANCGTSEHTSLQ

SEQ ID NO: 411 - protein, 50 aa, Artificial Sequence
  TPO-R binding sequence T1 (TPO10)
CQSNEFQCHNYNICLPRPWVCDGVNDCPDGSDEEGCSAPASEPPGSLSLQ

SEQ ID NO: 412 - protein, 50 aa, Artificial Sequence
  IgE-binding monomer sequence IGE-1
CPANEFQCRNSSTCIPRRWLCDGDDDCGDGSDETGCSAPASEPPGSLSLQ

SEQ ID NO: 413 - protein, 89 aa, Artificial Sequence
  IgE-binding walked dimer 1
CPANEFQCRNSSTCIPRRWLCDGDDDCGDGSDETGCSAPASEPPGSLCQPDQFRCSSGRCLSREWLCDGEDDCEDDSDETDCPTRTSLQ

SEQ ID NO: 414 - protein, 96 aa, Artificial Sequence
  IgE-binding walked dimer 2
CPANEFQCRNSSTCIPRRWLCDGDDDCGDGSDETGCSAPASEPPGSLCLPSQFPCDSGNCLPLTWLCDGVDDCGDNSDEEDCSAPASEPPGSLSLQ

SEQ ID NO: 415 - protein, 91 aa, Artificial Sequence
  IgE-binding walked dimer 3
CPANEFQCRNSSTCIPRRWLCDGDDDCGDGSDETGCSAPASEPPGSLCRANQFPCDNGNCLPQPWRCDGDNDCVDGSDETSCEAPAHTSLQ

SEQ ID NO: 416 - protein, 92 aa, Artificial Sequence
  IgE-binding walked dimer 4
CPANEFQCRNSSTCIPRRWLCDGDDDCGDGSDETGCSAPASEPPGSLCAPNEFQCRDNNTCLPEDWRCDGEDDCADNSDEANCTTPGPTSLQ

SEQ ID NO: 417 - protein, 99 aa, Artificial Sequence
  IgE-binding walked dimer 5
CPANEFQCRNSSTCIPRRWLCDGEDDCEDGSDEASDTCSAPASEPPGSLCPANEFQCRNSSTCIPRRWLCDGDDDCGDGSDETGCSAPASEPPGSLSLQ

SEQ ID NO: 418 - protein, 89 aa, Artificial Sequence
  IgE-binding walked dimer 6
CGSGQFPCGSGHCVPLNWVCDGVDDCGDDSDETDCKAHTCPANEFQCRNSSTCIPRRWLCDGDDDCGDGSDETGCSAPASEPPGSLSLQ

SEQ ID NO: 419 - protein, 91 aa, Artificial Sequence
  IgE-binding walked dimer 7
CPANEFQCRNSSTCIPRRWLCDGDDDCGDGSDETGCSAPASEPPGSLCGADQFPCSSGHCIPLPWVCDGEDDCADGSDEADCRGTEPTSLQ

SEQ ID NO: 420 - protein, 96 aa, Artificial Sequence
  IgE-binding walked dimer 8
CPANEFQCRNSSTCIPRRWLCDGDDDCGDGSDETGCSAPASEPPGSLCAPSQFRCGNGRCIPRSWRCDGEDDCADDSDEENCSAPASEPPGSLSLQ

SEQ ID NO: 421 - protein, 99 aa, Artificial Sequence
  IgE-binding walked dimer 9
RVWRRLVGSCRPNQFTCKSSETCIPAHWRCDGDDDCGDGSDEADCETRTCPANEFQCRNSSTCIPRRWLCDGDDDCGDGSDETGCSAPASEPPGSLSLQ

SEQ ID NO: 422 - protein, 90 aa, Artificial Sequence
  IgE-binding walked dimer 10
CPANEFQCRNSSTCIPRRWLCDGDDDCGDGSDETGCSAPASEPPGSLCQSSQFPCHDYEICLPATLLCDGVDDCLDGSDETNCAKPTSLQ

SEQ ID NO: 423 - protein, 91 aa, Artificial Sequence
  IgE-binding walked dimer 12
CPANEFQCRNSSTCIPRRWLCDGDDDCGDGSDEPGCSAPASEPPGSLCPPGEFPCGNGRSVPLTWLCDGVDDCGDNSDETGCETTGRTSLQ

SEQ ID NO: 424 - protein, 100 aa, Artificial Sequence
  IgE-binding walked dimer 13 (27), IgE-binding walked dimer 27 (13)
CGSNQFPCENGNCVPLGWGCDGVNDCQDNSDESLATCGRPGPGATSAPAACPANEFQCRNSSTCIPRRWLCDGDDDCGDGSDETGCSAPASEPPGSLSLQ

SEQ ID NO: 425 - protein, 90 aa, Artificial Sequence
  IgE-binding walked dimer 14
CPSGQFPCDNGHCIPRRWLCDGEDDCPDGSDEAQVCQQRTCPANEFQCRNSSTCIPRRWLCDGDDDCGDGSDETGCSAPASEPPGSLSLQ

SEQ ID NO: 426 - protein, 124 aa, Artificial Sequence
  IgE-binding walked dimer 15
CPANEFQCRNSSTCIPRRWLCDGDDDCGDGSDETGCSAPASEPPGSLSLQALLCDGVDDCRDGSDESALCEEHTCPANEFQCRNSSTCIPRRWLCDGDDDCGDGSDETGCSAPASEPPGSLSLQ

SEQ ID NO: 427 - protein, 91 aa, Artificial Sequence
  IgE-binding walked dimer 16
CPANEFQCRNSSTCIPRRWLCDGDDDCGDGSDEPGCSAPASEPPGSLCRRAEFTCRNGSCLPVPWLCDAENDCPDGSDEPDCGSPARRSLQ

SEQ ID NO: 428 - protein, 89 aa, Artificial Sequence
  IgE-binding walked dimer 19
CPANEFQCRNSSTCIPRRWLCDGDDDCGDGSDEPGCSAPASEPPGSLCPPDQFRCKNGRCIPRHLVCDGDDDCGDDSDEAGCQTRTSLQ

SEQ ID NO: 429 - protein, 93 aa, Artificial Sequence
  IgE-binding walked dimer 21
CPANEFQCRNSSTCIPRRWLCDGDDDCGDGSDETGCSAPASEPPGSLCEPGQFQCNNNDTCVSPPWLCDADRDCGRSDERPPHCATPELTSLQ

SEQ ID NO: 430 - protein, 100 aa, Artificial Sequence
  IgE-binding walked dimer 23
CPAGQFRCENGRCLPPPWRCDGVNDCEDNSDEAGCGDSHILPFSTPGPSTCPANEFQCRNSSTCIPRRWLCDGDDDCGDGSDETGCSAPASEPPGSLSLQ

SEQ ID NO: 431 - protein, 89 aa, Artificial Sequence
  IgE-binding walked dimer 25
CPANEFQCRNSSTCIPRRWLCDGDDDCGDGSDEPGCSAPASEPPGSLCLSSQFRCENGQCIPLTWGCDGDDDCQDGSDETNCPTRTSLQ

SEQ ID NO: 432 - protein, 92 aa, Artificial Sequence
  IgE-binding walked dimer 26
CPANEFQCRNSSTCIPRRWLCDGDDDCVDGSDETGCGSPVPTCPANEFQCRNSSTCIPRRWLCDGDDDCGDGSDETGCSAPASEPPGSLSLQ

SEQ ID NO: 433 - protein, 99 aa, Artificial Sequence
  IgE-binding walked dimer 30
CPANEFQCRNSSTCIPRRWLCDGDDDCGDGSDEPGCSAPASEPPGSLCAASQFRCNNNSRCLPPPLGCDGVDDCGDNSDEADCGRPGPGATSAPAASLQ

SEQ ID NO: 434 - protein, 97 aa, Artificial Sequence
  IgE-binding walked dimer 31
CPANEFQCRNSSTCIPRRWLCDGDDDCGDGSDETGCSAPASEPPGSLCPANEFQCRNSSTCIPRRWLCDGEDDCGDGSDETGCSAPASEPPGSLSLQ

SEQ ID NO: 435 - DNA, 30 bp, Artificial Sequence
  assembly PCR oligonucleotide
attctcactcggccgacggtgcctacccgt

SEQ ID NO: 436 - DNA, 65 bp, Artificial Sequence
  assembly PCR oligonucleotide
acggtgcctacccgtatgatgttccggattatgccccgggtctggaggcgtctggtggttcgtgt

SEQ ID NO: 437 - DNA, 85 bp, Artificial Sequence
  assembly PCR oligonucleotide
  modified_base (1)...(85): n = g, a, c or t
cgccgtcgcaamscmasbbcnstgraabgcatntkyygkwayysykgcatyyaaattbgbygrdagvktbacacgaaccaccaga

SEQ ID NO: 438 - DNA, 82 bp, Artificial Sequence
  assembly PCR oligonucleotide
  modified_base (21)...(21): n = g, a, c or t
cgccgtcgcaamscmasbbcnstgraabgcakykgccgytkyygcatyyaaattbgbygrdagvktbacacgaaccaccaga

SEQ ID NO: 439 - DNA, 82 bp, Artificial Sequence
  assembly PCR oligonucleotide
  modified_base (1)...(82): n = g, a, c or t
cgccgtcgcaamscmasbbcnstgraabgcatntkyygkwayysykgcacbkgaactsgyycgvcnsacacgaaccaccaga

SEQ ID NO: 440 - DNA, 79 bp, Artificial Sequence
  assembly PCR oligonucleotide
  modified_base (1)...(79): n = g, a, c or t
cgccgtcgcaamscmasbbcnstgraabgcakykgccgytkyygcacbkgaactsgyycgvcnsacacgaaccaccaga

SEQ ID NO: 441 - DNA, 40 bp, Artificial Sequence
  assembly PCR oligonucleotide
  modified_base (24)...(24): n = g, a, c or t
ttgcgacggcgwwratgattgtsnggacrrctcggatgaa

SEQ ID NO: 442 - DNA, 40 bp, Artificial Sequence
  assembly PCR oligonucleotide
ttgcgacggcgwwratgattgtssggacggctcggatgaa

SEQ ID NO: 443 - DNA, 40 bp, Artificial Sequence
  assembly PCR oligonucleotide
ttgcgacggcgwwratgattgtsrggacrrctcggatgaa

SEQ ID NO: 444 - DNA, 40 bp, Artificial Sequence
  assembly PCR oligonucleotide
  modified_base (24)...(24): n = g, a, c or t
ttgcgacggcgwwccggattgtsnggacrrctcggatgaa

SEQ ID NO: 445 - DNA, 40 bp, Artificial Sequence
  assembly PCR oligonucleotide
ttgcgacggcgwwccggattgtssggacggctcggatgaa

SEQ ID NO: 446 - DNA, 40 bp, Artificial Sequence
  assembly PCR oligonucleotide
ttgcgacggcgwwccggattgtsrggacrrctcggatgaa

SEQ ID NO: 447 - DNA, 50 bp, Artificial Sequence
  assembly PCR oligonucleotide
aggcctgcaatgacgtabgckbtkbacagyytkyttcatccgagyygtcc

SEQ ID NO: 448 - DNA, 56 bp, Artificial Sequence
  assembly PCR oligonucleotide
  modified_base (1)...(56): n = g, a, c or t
aggcctgcaatgacgtabgtncggnssytbyacagyytkyttcatccgagyygtcc

SEQ ID NO: 449 - DNA, 65 bp, Artificial Sequence
  assembly PCR oligonucleotide
aggcctgcaatgacactttgtgaaattccggatcctggctacagyytkyttcatccgagyygtcc

SEQ ID NO: 450 - DNA, 71 bp, Artificial Sequence
  assembly PCR oligonucleotide
aggcctgcaatgacagggaacccggcggttcagatgctggcgcgctacagyytkyttcatccgagyygtcc

SEQ ID NO: 451 - DNA, 77 bp, Artificial Sequence
  assembly PCR oligonucleotide
aggcctgcaatgacgctgccggtgcagaagtcgcacctgggcccggacgaccacagyytkyttcatccgagyygtcc

SEQ ID NO: 452 - DNA, 83 bp, Artificial Sequence
  assembly PCR oligonucleotide
aggcctgcaatgacgtgctcggacctggggtgctaaacggcagaatatgagaatcaccacagyytkyttcatccgagyygtcc

SEQ ID NO: 453 - DNA, 53 bp, Artificial Sequence
  assembly PCR oligonucleotide
aggcctgcaatgacgtabgckbtkbacamwsckscgvttcatccgagccgtcc

SEQ ID NO: 454 - DNA, 59 bp, Artificial Sequence
  assembly PCR oligonucleotide
  modified_base (1)...(59): n = g, a, c or t
aggcctgcaatgacgtabgtncggnssytbyacamwsckscgvttcatccgagccgtcc

SEQ ID NO: 455 - DNA, 68 bp, Artificial Sequence
  assembly PCR oligonucleotide
aggcctgcaatgacactttgtgaaattccggatcctggctacamwsckscgvttcatccgagccgtcc

SEQ ID NO: 456 - DNA, 74 bp, Artificial Sequence
  assembly PCR oligonucleotide
aggcctgcaatgacagggaacccggcggttcagatgctggcgcgctacamwsckscgvttcatccgagccgtcc

SEQ ID NO: 457 - DNA, 80 bp, Artificial Sequence
  assembly PCR oligonucleotide
aggcctgcaatgacgctgccggtgcagaagtcgcacctgggcccggacgaccacamwsckscgvttcatccgagccgtcc

SEQ ID NO: 458 - DNA, 86 bp, Artificial Sequence
  assembly PCR oligonucleotide
aggcctgcaatgacgtgctcggacctggggtgctaaacggcagaatatgagaatcaccacamwsckscgvttcatccgagccgtcc

SEQ ID NO: 459 - DNA, 56 bp, Artificial Sequence
  assembly PCR oligonucleotide
aggcctgcaatgacgtabgckbtkbacagdkwkccrrcgvttcatccgagyygtcc

SEQ ID NO: 460 - DNA, 62 bp, Artificial Sequence
  assembly PCR oligonucleotide
  modified_base (1)...(62): n = g, a, c or t
aggcctgcaatgacgtabgtncggnssytbyacagdkwkccrrcgvttcatccgagyygtcc

SEQ ID NO: 461 - DNA, 71 bp, Artificial Sequence
  assembly PCR oligonucleotide
aggcctgcaatgacactttgtgaaattccggatcctggctacagdkwkccrrcgvttcatccgagyygtcc

SEQ ID NO: 462 - DNA, 77 bp, Artificial Sequence
  assembly PCR oligonucleotide
aggcctgcaatgacagggaacccggcggttcagatgctggcgcgctacagdkwkccrrcgvttcatccgagyygtcc

SEQ ID NO: 463 - DNA, 83 bp, Artificial Sequence
  assembly PCR oligonucleotide
aggcctgcaatgacgctgccggtgcagaagtcgcacctgggcccggacgaccacagdkwkccrrcgvttcatccgagyygtcc

SEQ ID NO: 464 - DNA, 89 bp, Artificial Sequence
  assembly PCR oligonucleotide
aggcctgcaatgacgtgctcggacctggggtgctaaacggcagaatatgagaatcaccacagdkwkccrrcgvttcatccgagyygtcc

SEQ ID NO: 465 - DNA, 67 bp, Artificial Sequence
  assembly PCR oligonucleotide
tgaattttctgtatgaggttttgctaaacaactttcaacagtttcggccccagaggcctgcaatgac

SEQ ID NO: 466 - DNA, 17 bp, Artificial Sequence
  PCR amplification oligonucleotide
aagcctcagcgaccgaa

SEQ ID NO: 467 - DNA, 18 bp, Artificial Sequence
  PCR amplification oligonucleotide
agcccaataggaacccat

SEQ ID NO: 468 - protein, 81 aa, Artificial Sequence
  clone CD28-A1
CGPGRFQCESGQCIPATWVCDGENDCVDDSDEKSCATTAPTCLPDQFQCHDYRRCIPLGWVCDGVPDCVDNSDEANCEPPT

SEQ ID NO: 469 - protein, 81 aa, Artificial Sequence
  clone CD28-A2
CGPGRFQCESGQCIPATWVCDGENDCVDDSDEKSCATTAPTCPPDQFTCNSGRCVPLNWLCDGVNDCADSSDEPPECQPRT

SEQ ID NO: 470 - protein, 135 aa, Artificial Sequence
  clone CD28-A10
CGPGRFQCESGQCVPATWVCDGDDDCADGSDEKSCATTAPTCESNQFQCGSGQCLPGTWRCDGVNDCADSSDETGCGRPGPGATSAPAACGPGRFQCNNGNCVPQTLGCDGDNDCGDSSDEANCSAPASEPPGSL

SEQ ID NO: 471 - protein, 83 aa, Artificial Sequence
  clone CD28-A4
CGPGRFQCESGQCIPATWVCDGENDCVDDSDEKSCATTAPTCPANQFQCGNGRCIPPAWLCDGVNDCGDGSDESQLCAATGPT

SEQ ID NO: 472 - protein, 85 aa, Artificial Sequence
  clone CD28-A5
CGPGRFQCESGQCIPATWVCDGENDCVDDSDEKSCATTAPTCLPNEFRCSNGQCIPPNWRCDGVDDCRDGSDEAGCSQDPEFHKV

SEQ ID NO: 473 - protein, 84 aa, Artificial Sequence
  clone CD28-A7
CGPGRFQCESGQCIPATWVCDGENDCVDDSDEKSCATTAPTCGSGQFRCSNGNCLPLRLGCDGVDDCGDSSDEPLDPCAATVRT

SEQ ID NO: 474 - protein, 80 aa, Artificial Sequence
  clone CD28-A17
CGPGRFQCESGQCIPATWVCDGENDCVDDSDEKSCATTAPTCPSGQFKCNSGRCVPPNWLCDGVNDCPDNSDEANCPPRT

SEQ ID NO: 475 - protein, 83 aa, Artificial Sequence
  clone CD28-A19
CGPGRFQCESGQCIPATWVCDGENDCVDDSDEKSCATTAPTCQADEFQCQSSGKCLPVNWVCDGDNDCGDDSDETNCATTGRT

SEQ ID NO: 476 - DNA, 30 bp, Artificial Sequence; identical to SEQ ID NO: 435
  assembly PCR oligonucleotide

SEQ ID NO: 477 - DNA, 65 bp, Artificial Sequence; identical to SEQ ID NO: 436
  assembly PCR oligonucleotide

SEQ ID NO: 478 - DNA, 85 bp, Artificial Sequence; identical to SEQ ID NO: 437
  assembly PCR oligonucleotide
  modified_base (1)...(85): n = g, a, c or t

SEQ ID NO: 479 - DNA, 82 bp, Artificial Sequence; identical to SEQ ID NO: 438
  assembly PCR oligonucleotide
  modified_base (21)...(21): n = g, a, c or t

SEQ ID NO: 480 - DNA, 82 bp, Artificial Sequence; identical to SEQ ID NO: 439
  assembly PCR oligonucleotide
  modified_base (1)...(82): n = g, a, c or t

SEQ ID NO: 481 - DNA, 79 bp, Artificial Sequence; identical to SEQ ID NO: 440
  assembly PCR oligonucleotide
  modified_base (1)...(79): n = g, a, c or t

SEQ ID NO: 482 - DNA, 40 bp, Artificial Sequence; identical to SEQ ID NO: 441
  assembly PCR oligonucleotide
  modified_base (24)...(24): n = g, a, c or t

SEQ ID NO: 483 - DNA, 40 bp, Artificial Sequence; identical to SEQ ID NO: 442
  assembly PCR oligonucleotide

SEQ ID NO: 484 - DNA, 40 bp, Artificial Sequence; identical to SEQ ID NO: 443
  assembly PCR oligonucleotide

SEQ ID NO: 485 - DNA, 40 bp, Artificial Sequence; identical to SEQ ID NO: 444
  assembly PCR oligonucleotide
  modified_base (24)...(24): n = g, a, c or t

SEQ ID NO: 486 - DNA, 40 bp, Artificial Sequence; identical to SEQ ID NO: 445
  assembly PCR oligonucleotide

SEQ ID NO: 487 - DNA, 40 bp, Artificial Sequence; identical to SEQ ID NO: 446
  assembly PCR oligonucleotide

SEQ ID NO: 488 - DNA, 50 bp, Artificial Sequence; identical to SEQ ID NO: 447
  assembly PCR oligonucleotide

SEQ ID NO: 489 - DNA, 56 bp, Artificial Sequence; identical to SEQ ID NO: 448
  assembly PCR oligonucleotide
  modified_base (1)...(56): n = g, a, c or t

SEQ ID NO: 490 - DNA, 65 bp, Artificial Sequence; identical to SEQ ID NO: 449
  assembly PCR oligonucleotide

SEQ ID NO: 491 - DNA, 71 bp, Artificial Sequence; identical to SEQ ID NO: 450
  assembly PCR oligonucleotide

SEQ ID NO: 492 - DNA, 77 bp, Artificial Sequence; identical to SEQ ID NO: 451
  assembly PCR oligonucleotide

SEQ ID NO: 493 - DNA, 83 bp, Artificial Sequence; identical to SEQ ID NO: 452
  assembly PCR oligonucleotide

SEQ ID NO: 494 - DNA, 53 bp, Artificial Sequence; identical to SEQ ID NO: 453
  assembly PCR oligonucleotide

SEQ ID NO: 495 - DNA, 59 bp, Artificial Sequence; identical to SEQ ID NO: 454
  assembly PCR oligonucleotide
  modified_base (1)...(59): n = g, a, c or t

SEQ ID NO: 496 - DNA, 68 bp, Artificial Sequence; identical to SEQ ID NO: 455
  assembly PCR oligonucleotide

SEQ ID NO: 497 - DNA, 74 bp, Artificial Sequence; identical to SEQ ID NO: 456
  assembly PCR oligonucleotide

SEQ ID NO: 498 - DNA, 80 bp, Artificial Sequence; identical to SEQ ID NO: 457
  assembly PCR oligonucleotide

SEQ ID NO: 499 - DNA, 86 bp, Artificial Sequence; identical to SEQ ID NO: 458
  assembly PCR oligonucleotide

SEQ ID NO: 500 - DNA, 56 bp, Artificial Sequence; identical to SEQ ID NO: 459
  assembly PCR oligonucleotide

SEQ ID NO: 501 - DNA, 62 bp, Artificial Sequence; identical to SEQ ID NO: 460
  assembly PCR oligonucleotide
  modified_base (1)...(62): n = g, a, c or t

SEQ ID NO: 502 - DNA, 71 bp, Artificial Sequence; identical to SEQ ID NO: 461
  assembly PCR oligonucleotide

SEQ ID NO: 503 - DNA, 77 bp, Artificial Sequence; identical to SEQ ID NO: 462
  assembly PCR oligonucleotide

SEQ ID NO: 504 - DNA, 83 bp, Artificial Sequence; identical to SEQ ID NO: 463
  assembly PCR oligonucleotide

SEQ ID NO: 505 - DNA, 89 bp, Artificial Sequence; identical to SEQ ID NO: 464
  assembly PCR oligonucleotide

SEQ ID NO: 506 - DNA, 67 bp, Artificial Sequence; identical to SEQ ID NO: 465
  assembly PCR oligonucleotide

SEQ ID NO: 507 - protein, 97 aa, Artificial Sequence
  clone IL6#4, IL-6 clone 4
CLSSQFQCKNGQCIPQTWVCDGDNDCEDDSDETGCGDSHILPFSTPGPSTCPPSQFTCRSTNTCIPAPWRCDGDDDCEDDSDEEGCSAPASEPPGSL

SEQ ID NO: 508 - protein, 90 aa, Artificial Sequence
  clone IL6#7
CLSSQFQCKNGQCIPQTWVCDGDNDCEDDSDETGCGDSHILPFSTPGPSTCRSNEFQCRSSGICIPRTWVCDGDDDCLDNSDEKDCAART

SEQ ID NO: 509 - protein, 96 aa, Artificial Sequence
  clone IL6#9, IL-6 clone 9
CRSDQFQCGSGHCIPQDWVCDGENDCEDGSDETDCSAPASEPPGSLCLSSQFQCKNGQCIPQTWVCDGDNDCEDDSDETGCGDSHILPFSTPGPST

SEQ ID NO: 510 - protein, 86 aa, Artificial Sequence
  clone IL6#P8
CRSDQFQCGSGHCIPQDWVCDGENDCEDGSDETDCSAPASEPPGSLCRSNEFQCRSSGICIPRTWVCDGDDDCLDNSDEKDCAART

SEQ ID NO: 511 - protein, 101 aa, Artificial Sequence
  clone IL6#N7
CPPSQFTCRSTNTCIPAPWRCDGDDDCEDDSDEADCGDSHILPFSTPGPSTCLSSQFQCKNGQCIPQTWVCDGDNDCEDDSDETGCGDSHILPFSTPGPST
